(19) United States
(12) Patent Application Publication
(10) Pub. No.: US 2023/0022575 A1
(43) Pub. Date: Jan. 26, 2023

(54) BACTERIAL CONJUGATIVE SYSTEM AND THERAPEUTIC USES THEREOF

(71) Applicant: SOCIÉTÉ DE COMMERCIALISATION DES PRODUITS DE LA RECHERCHE APPLIQUÉE SOCPRA SCIENCES SANTÉ ET HUMAINE, Sherbrooke (CA)

(72) Inventors: Sébastien RODRIGUE, Sherbrooke (CA); Kevin NEIL, Sherbrooke (CA); Nancy ALLARD, Sherbrooke (CA); Vincent BURRUS, Sherbrooke (CA)

(21) Appl. No.: 17/258,893

(22) PCT Filed: Jul. 9, 2019
(86) PCT No.: PCT/CA2019/050945

§ 371 Date: Jan. 8, 2021

Related U.S. Application Data
(60) Provisional application No. 62/696,367, filed on Jul. 11, 2018.

(51) Int. Cl. C12N 15/90; C12N 15/10; C12N 15/70; A61P 31/04

(52) U.S. Cl. CPC C12N 15/907; C12N 15/102; C12N 15/70; A61P 31/04; A61K 35/741

(57) ABSTRACT

The present disclosure concerns the use of a mating pair stabilization module comprising a type IV adhesion pilus with a conjugative bacterial host cell or as a part of a conjugative delivery system for mediating effective in vivo conjugation.

### TECHNOLOGICAL FIELD

[0001] The present disclosure relates to a bacterial conjugative system for transferring, in vivo, a nucleic acid cargo from a conjugative bacterium to a recipient bacterium.

### BACKGROUND

[0002] Bacterial communities play an important role in human and animal health. It is now clearly established that imbalances in gut microbial populations, also known as dysbiosis, are linked to several severe pathologies such as: cancer, diabetes, Crohn's disease, and irritable bowel syndrome to name only a few. Being able to precisely manipulate bacterial communities to restore and/or maintain healthy microbiomes would therefore be of great interest to cure those diseases. For example, having a technology allowing the selective elimination or inactivation of pathogenic bacteria, while maintaining the beneficial flora of a microbiome intact, would be a highly valuable therapeutic tool. In addition, having the possibility to modify certain bacteria of a microbial community so they can locally provide therapeutic agents to the organ they colonize would also be an important approach for improving human and animal health. In summary, developing a tool that would allow precise in situ manipulation of human or animal microbiomes could unleash new promising therapeutic possibilities.

[0003] Parallel to this, public health is also challenged by the alarming emergence of antibiotic resistant bacteria that infects the gut (e.g. Campylobacter, Escherichia coli and Salmonella), the urinary tract (e.g. Escherichia coli), and wounds (e.g. Staphylococcus aureus). This is a major concern because the development of new antibiotic molecules has declined drastically over the last decades. It is estimated that by 2050 antibiotic resistant bacteria will be responsible for more human deaths than cancer. Therefore, to palliate the growing inefficiency of conventional antibiotics, there is an urgent need to develop new alternative drugs to fight antibiotic resistant bacteria.

[0004] Bacterial conjugation is a natural process through which a donor bacterium transfers genetic material, via a conjugative element, into a recipient bacterium. Owing to the recent advances in synthetic biology, bacteria (such as probiotics) could be engineered to use bacterial conjugation in order to transfer a genetic cargo containing the CRISPR-cas9 RNA-guided nuclease system into a target bacterium. This new class of drug, based on a probiotic capable of delivering CRISPR-cas9 to target bacteria, could provide an efficient way to manipulate microbiomes, or treat bacterial infections, in situ. For instance, such probiotics could be used to transfer the CRISPR-cas9 RNA-guided nuclease system into target bacteria to delete antibiotic resistance genes or to eliminate pathogenic bacteria by inducing double-strand breaks in their chromosomes. This principle could also be directly applied to the treatment of dysbiosis by targeting over-represented species of bacteria, hereby editing the microbiome with great precision.

[0005] While engineering bacteria, including probiotics, that use bacterial conjugation to deliver CRISPR-cas9 system to modify microbiomes is a promising avenue, this approach faces some serious technological challenges that need to be addressed. As a matter of facts, to be useful, this technology requires that: (1) the engineered probiotic is capable of carrying out bacterial conjugation in vivo inside the environment of human or animal body (e.g. in the gut, the urinary tract, or a wound), and (2) the in vivo conjugation efficiency must be high enough to achieve satisfactory therapeutic effects.

[0006] Up to now, bacterial conjugation has been studied almost exclusively in vitro in Petri dishes, an environment that significantly differs from the conditions encountered in vivo in a human or animal body. Very little is known about which conjugative bacterial systems are actually capable of functioning in vivo, and at what efficiency. In stark contrast to drugs derived from chemical molecules (e.g. traditional antibiotics), for which the in vitro activity in a Petri dish is indicative of the in vivo activity, drugs based on living organisms (e.g. bacteria) are not as predictable. For instance, contrary to inert chemical molecules, bacteria are living organisms that are adapted to certain conditions, and that respond to their environment via complex mechanisms affecting a plethora of cellular processes. Therefore, it is difficult to predict if a bacterium capable of conjugation in vitro will be able to perform conjugation under in vivo conditions. In short, for drugs that use living organisms as therapeutic vectors, the in vitro efficacy is not sufficient to predict the ability of the drug to function in vivo.

[0007] In sum, a new class of therapeutics based on bacterial conjugation is a very promising therapeutic avenue to manipulate bacterial communities in situ. However, in order to become a viable approach, this technology requires the development of a bacterial system actually capable of carrying out conjugation in vivo, and this, with high-efficiency. Such bacterial system can then be used as a universal platform for the transfer and delivery of CRISPR-cas9, or any other type of genetic cargo that can eliminate or modify target bacteria.

### BRIEF SUMMARY

[0008] According to a first aspect, the present disclosure provides a conjugative bacterial host cell for transferring, in vivo, a genetic cargo to a recipient bacterial cell. The conjugative bacterial host cell comprises (i) the genetic cargo (wherein the genetic cargo comprises a transport module operatively associated with a payload module); (ii) a type IV secretion system module, (iii) a mating pair stabilization module comprising a type IV adhesion pilus, the type IV adhesion pilus comprising an adhesin; and (iv) a mobilization module. The transport module is capable of being recognized by the transport machinery encoded by the mobilization module. In an embodiment, the type IV adhesion pilus and/or the adhesin comprises at least one of the following proteins: PilL, PilN, PilO, PilP, PilQ, PilR, PilS, PilT, TraB, PilU, PilV or TraN. In another embodiment, the type IV adhesion pilus is derived from at least one of the following family of bacterial plasmids: IncA, IncB/O (Inc10), IncC, IncD, IncE, IncF1, IncF2, IncG, IncHI1, IncHI2, IncI1, IncI2, IncJ, IncK, IncL/M, IncN, IncP, IncQ1, IncQ2, IncR, IncS, IncT, IncU, IncV, IncW, IncX1, IncX2, IncY, IncZ, ColE1, ColE2, ColE3, p15A, pSC101, IncP-2, IncP-5, IncP-7, IncP-8, IncP-9, Inc1, Inc4, Inc7, Inc8, Inc9, Inc11, Inc13, Inc14 or Inc18. In still another embodiment, the type IV secretion system module comprises at least one of the following proteins: VirB1, VirB2, VirB3, VirB4, VirB5, VirB6, VirB7, VirB8, VirB9, VirB10, VirB11 or VirD4. In yet another embodiment, the type IV secretion system module is derived from at least one of the following family of bacterial plasmids: MPF_{T}, MPF_{F}, MPF_{I}, MPF_{FATA}, MPF_{B}, MPF_{FA}, MPF_{G} or MPF_{C}. In yet a further embodiment, the genetic cargo is located on a first extrachromosomal vector and further comprises a first vegetative replication module, the conjugative bacterial host cell comprises a first maintenance module encoding a first replication machinery, and the first vegetative replication module is capable of being recognized by the first replication machinery encoded by the first maintenance module. In such embodiment, the first maintenance module comprises at least one of the following proteins: RepA, ParA, ParB, a DNA primase, YgiA, a toxin, Vcrx028, YcfA, an antitoxin, Vcrx027, YcfB, a DNA topoisomerase, YdiA or YdgA. In still another embodiment, the first vegetative replication module or the first maintenance module is derived from at least one of the following family of bacterial plasmids: IncA, IncB/O (Inc10), IncC, IncD, IncE, IncF1, IncF2, IncG, IncHI1, IncHI2, IncI1, IncI2, IncJ, IncK, IncL/M, IncN, IncP, IncQ1, IncQ2, IncR, IncS, IncT, IncU, IncV, IncW, IncX1, IncX2, IncY, IncZ, ColE1, ColE2, ColE3, p15A, pSC101, IncP-2, IncP-5, IncP-7, IncP-8, IncP-9, Inc1, Inc4, Inc7, Inc8, Inc9, Inc11, Inc13, Inc14 or Inc18. In still a further embodiment, the genetic cargo comprises the mobilization module. In an embodiment, the conjugative bacterial host cell comprises a transfer machinery located on a second extrachromosomal vector, wherein the transfer machinery comprises the type IV secretion system module, the mating pair stabilization module and a second vegetative replication module; the conjugative bacterial host cell comprises a second maintenance module encoding a second replication machinery; and the second vegetative replication module is capable of being recognized by the second replication machinery machinery encoded by the second maintenance module. In an embodiment, the second maintenance module comprises at least one of the following proteins: RepA, ParA, ParB, a DNA primase, YgiA, a toxin, Vcrx028, YcfA, an antitoxin, Vcrx027, YcfB, a DNA topoisomerase, YdiA or YdgA. In a further embodiment, the second vegetative replication module or the second maintenance module is derived from at least one of the following family of bacterial plasmids: IncA, IncB/O (Inc10), IncC, IncD, IncE, IncF1, IncF2, IncG, IncHI1, IncHI2, IncI1, IncI2, IncJ, IncK, IncL/M, IncN, IncP, IncQ1, IncQ2, IncR, IncS, IncT, IncU, IncV, IncW, IncX1, IncX2, IncY, IncZ, ColE1, ColE2, ColE3, p15A, pSC101, IncP-2, IncP-5, IncP-7, IncP-8, IncP-9, Inc1, Inc4, Inc7, Inc8, Inc9, Inc11, Inc13, Inc14 or Inc18. In an embodiment, the transfer machinery further comprises the mobilization module. In yet another embodiment, the conjugative bacterial host cell comprises a transfer machinery located in the bacterial chromosome, wherein the transfer machinery comprises the type IV secretion system module, the mating pair stabilization module and the mobilization module. In an embodiment, the conjugative bacterial host cell further comprises an exclusion module, a selection module and/or a regulatory module. In an embodiment, the regulatory module comprises at least one of the following regulatory protein or non-coding RNA: YajA, YafA, FinO, Fur, Fnr, KorA, AcaC, AcaD, Acr1, Acr2, StbA, TwrA, ResP, KfrA, ArdK, dCas9, crRNA, ZFN, TALEN, taRNA, toehold switch, AraC, TetR, LacI or Laclq. In another embodiment, the mobilization module comprises at least one of the following proteins: VirC1, NikB or NikA. In still another embodiment, the mobilization module is derived from at least one of the following family of bacterial plasmids: MOB_{F}, MOB_{P}, MOB_{V}, MOB_{H}, MOB_{C} or MOB_{Q}. In a further embodiment, the mating pair stabilization module further comprises a shufflase for modifying a shufflon associated with the gene encoding the adhesin. In still another embodiment, the shufflon is derived from at least one of the following family of bacterial plasmids: IncA, IncB/O (Inc10), IncC, IncD, IncE, IncF1, IncF2, IncG, IncHI1, IncHI2, IncI1, IncI2, IncJ, IncK, IncL/M, IncN, IncP, IncQ1, IncQ2, IncR, IncS, IncT, IncU, IncV, IncW, IncX1, IncX2, IncY, IncZ, ColE1, ColE2, ColE3, p15A, pSC101, IncP-2, IncP-5, IncP-7, IncP-8, IncP-9, Inc1, Inc4, Inc7, Inc8, Inc9, Inc11, Inc13, Inc14 and/or Inc18. In a further embodiment, the shufflase is encoded by a rci gene. In a further embodiment, the sufflase is derived from at least one of the following family of bacterial plasmids: IncA, IncB/O (Inc10), IncC, IncD, IncE, IncF1, IncF2, IncG, IncHI1, IncHI2, IncI1, IncI2, IncJ, IncK, IncL/M, IncN, IncP, IncQ1, IncQ2, IncR, IncS, IncT, IncU, IncV, IncW, IncX1, IncX2, IncY, IncZ, ColE1, ColE2, ColE3, p15A, pSC101, IncP-2, IncP-5, IncP-7, IncP-8, IncP-9, Inc1, Inc4, Inc7, Inc8, Inc9, Inc11, Inc13, Inc14 and/or Inc18. In still a further embodiment, the payload module encodes a nuclease. In yet another embodiment, the nuclease is a clustered regularly interspaced short palindromic repeat (CRISPR) associated DNA-binding (Cas) protein or a Cas protein analog and the payload module further encodes a CRISPR RNA (crRNA) molecule recognizable by the Cas protein or the Cas protein analog. In still another embodiment, the crRNA molecule is substantively complementary to a DNA molecule in the recipient bacterium. In yet a further embodiment, the DNA molecule corresponds to a gene in the recipient bacterium. In an embodiment, the gene encodes a virulence factor in the recipient bacterium. In still another embodiment, the payload module further encodes a trans-activating CRISPR RNA recognizable by the Cas protein or the Cas protein analog. In another embodiment, the payload module encodes a therapeutic protein. In another embodiment, the therapeutic protein allows for the production or the degradation of a metabolite. In an embodiment, the conjugative bacterial host cell has an in vivo conjugation efficiency of at least 10⁻³ bacterial transconjugant/recipient CFU and/or a ratio of in vitro conjugation efficiency obtained in a liquid medium when compared to a corresponding conjugation efficiency obtained in a solid medium higher than 0.1%. In still another embodiment, the conjugative bacterium is a probiotic bacterium. In a further embodiment, the conjugative bacterium is an enteric bacterium. In some embodiment, the conjugative bacterial host cell is from the genus Escherichia, for example, from the species Escherichia coli and in some specific embodiments, from the strain Escherichia coli Nissle 1917.

[0009] According to a second aspect, the present disclosure provides a composition comprising the conjugative bacterial host defined herein and an excipient. In some embodiments, the composition is formulated for oral administration.

[0010] According to a third aspect, the present disclosure provides a process for making the conjugative bacterial host cell defined herein, the process comprises introducing the genetic cargo and at least one of the type IV secretion system module, the mating pair stabilization module or the mobilization module defined herein in a bacterium to provide the conjugative bacterial host cell. In some embodiments, the process further comprises introducing at least one of the vegetative replication module, the maintenance module, the regulatory module, the selection module or the exclusion module as defined herein in the bacterium to provide the conjugative bacterial host cell.

[0011] According to a fourth aspect, the present disclosure provides a conjugative recombinant bacterial host cell obtainable or obtained by the process described herein.

[0012] According to fifth aspect, the present disclosure provides a process for making the composition defined herein, the process comprising formulating the conjugative bacterial host cell defined in herein with an excipient.

[0013] According to a sixth aspect, the present disclosure provides a composition obtainable or obtained by the process described herein.

[0014] According to a seventh aspect, the present disclosure provides a conjugative recombinant bacterial host cell defined herein or a composition defined herein for transferring, in vivo in a subject suspected of having a recipient bacterium, the genetic cargo from the conjugative bacterial host cell to the recipient bacterium. The present disclosure also provides the use of a conjugative recombinant bacterial host cell defined herein or a composition defined herein for transferring, in vivo in a subject suspected of having a recipient bacterium, a genetic cargo from the conjugative bacterial host cell to the recipient bacterium. The present disclosure further provides the use of a conjugative recombinant bacterial host cell defined herein or a composition defined herein for the manufacture of a medicament for transferring, in vivo in a subject suspected of having a recipient bacterium, a genetic cargo from the conjugative bacterial host cell to the recipient bacterium. The present disclosure also provides a method for transferring, in vivo in a subject suspected of having a recipient bacterium, a genetic cargo from a conjugative bacterial host cell to the recipient bacterium, the method comprising administering an effective amount of a conjugative recombinant bacterial host cell defined herein or a composition defined herein to the subject under conditions to allow the transfer of the genetic cargo to the recipient bacterium. In some embodiments, the conjugative bacterial host cell is a probiotic bacterial host cell and/or an enteric bacterium. In another embodiment, the modification system of the conjugative bacterial host cell is substantially similar to the restriction system of the recipient bacterium. In another embodiment, the payload module encodes a heterologous protein, such as for example a therapeutic protein, a heterologous protein allowing for the production or the degradation of a metabolite, and/or a nuclease. In an embodiment, the nuclease is a clustered regularly interspaced short palindromic repeat (CRISPR) associated DNA-binding (Cas) protein and the payload module further encodes a guide RNA (gRNA) molecule recognizable by the Cas protein. In some embodiments, the gRNA molecule is substantively complementary to a DNA molecule in the recipient bacterium. In a further embodiment, the DNA molecule is a gene in the recipient bacterium. In yet a further embodiment, the gene encodes, in the recipient bacterium, a virulence factor, a protein involved in a resistance to an antibiotic, a toxin or a pilus. In some embodiments, the conjugative bacterial host cell can be used for the treatment or the alleviation of symptoms of a dysbiosis or an infection caused by the recipient bacterium.

### BRIEF DESCRIPTION OF THE DRAWINGS

[0015] Having thus generally described the nature of the invention, reference will now be made to the accompanying drawings, showing by way of illustration, a preferred embodiment thereof, and in which:

[0016] FIG. 1.A to D. Generation of Escherichia coli Nissle 1917 (EcN) strain derivatives required to easily distinguish the donor and recipient strains in conjugation experiments. The donor strain, termed KN11, was generated by insertion of the first cassette, including a specialized metagenomics sequencing (16S) tag and aad7, a spectinomycin resistance gene (FIG. 1.A). KN02 harbored a different cassette containing a different metagenomics sequencing (16S) tag, strAB for streptomycin resistance, an IPTG inducible NeonGreen fluorescent reporter, and the cat gene conferring resistance to chloramphenicol (FIG. 1.B). KN02 was used both as a recipient and as a target strain. KN03 had an insert that contains strAB for streptomycin resistance, the same metagenomics sequencing (16S) tag as KN02 and tetB for tetracycline resistance (FIG. 1.C). KN03 was used as both a recipient and a non-target control. All genes in FIG. 1.A to C are shown to scale with the total amount of base pair (bp) shown below each DNA construct. All inserts were cloned into pGRG36's SmaI and XhoI restriction sites located between attL_{Tn7} and attR_{Tn7} sites. (FIG. 1.D) The resulting plasmids were transformed in EcN and the expression of the Tn7 system was induced with arabinose. This led to the excision of the DNA fragment located between the attL/R_{Tn7} of pGRG36, which was was next integrated at the 3′ end of the glmS gene. Since the pGRG36 replication machinery is heat-sensitive, an incubation at a non-permissive temperature of 42° C. was finally used to cure the empty vector backbone from the cell.

[0017] FIG. 2. Impact of dapA deletion on E. coli's metabolism. The deletion of dapA prevents the transformation of L-asparate-semialdehyde into 4-hydroxy-2,3,4,5-tetrahydrodipicolinate (THDP-OH). This reaction is essential for synthesis of both forms of DAP in E. coli. L,L-DAP and meso-DAP can however be imported from the environment to complement the mutation and allow the synthesis of both peptidoglycan and lysine. This makes DAP an essential medium additive for growth of the dapA deletion mutants. Abbreviations and designations: THDP-OH: 4-hydroxy-2,3,4,5-tetrahydrodipicolinate; THDP, (S)-2,3,4,5-tetrahydrodipicolinate; Succinyl-AKP, N-succinyl-L-2-amino-6-ketopimelate; Succinyl-DAP, N-succinyl-L,L-2,6-diaminopimelate; L,L-DAP, LL-2,6-diaminopimelate; meso-DAP, meso-2,6-diaminopimelate; DapA, dihydrodipicolinate synthase; DapB, dihydrodipicolinate reductase; DapD, THDPA succinylase; SerC, succinyl-DAP aminotransferase; DapE, succinyl-DAP desuccinylase; DapF, DAP epimerase; LysA, DAP decarboxylase.

[0018] FIGS. 3.A to G. Streptomycin (Sm) treatment improves mouse gut colonization by Escherichia coli Nissle 1917 (EcN). The ability of different Sm concentrations to deplete endogenous Enterobacteriaceae (white area) and to promote EcN colonization (gray area) was evaluated by quantifying CFU in feces from mice treated with 0 mg/L (FIG. 3.A), 50 mg/L (FIG. 3.B), 100 mg/L (FIG. 3.C), 250 mg/L (FIG. 3.D), 450 mg/L (FIG. 3.E) and 1000 mg/L (FIG. 3.F) in drinking water starting at day −2. The colonization levels of KN01 in several sections of the intestinal tract of untreated (0) and streptomycin-treated ( ) mice was evaluated (FIG. 3.G). The dotted line in panel G indicates sufficient CFU levels for conjugation frequency evaluation. This was based on the minimal in vitro conjugation rate on solid support for all tested systems (about 1×10⁻³ transconjugants/recipient). Horizontal black lines show the mean values under each condition.

[0019] FIGS. 4.A to E. Evaluation of transfer efficiencies for conjugative plasmid candidates. Six different conjugative plasmids were first tested for transfer efficiency both on agar (solid) and in broth (liquid) for 2 hours at 37° C. (FIG. 4.A). Conjugative plasmids were also tested for their transfer efficiency in the murine gut using 4 mice per experiment. The proportion of transconjugants per recipient bacteria was evaluated in feces (FIG. 4.B) throughout 3 days and compared to the ratio found in the caecum at day 3 (FIG. 4.C). TP114's ability to transfer was confirmed using an additional set of 4 mice, and compared to the conjugation frequencies obtained in vitro on agar for the same time points (FIG. 4.D). Conjugation experiments with TP114 and R6K in both Sm treated and untreated mice were performed to compare transfer efficiencies within partly depleted or intact microbiota. Transfer rates were measured in the feces after 12 hours of conjugation in 4 mice per conditions per plasmid (FIG. 4.E). Error bars show standard deviation of the mean (black lines) from at least 3 biological replicates.

[0020] FIGS. 5.A to F. Raw colony forming units (CFUs) data used to calculate in vivo transfer rates showed in FIG. 4.B. The CFUs for donors (•), recipients (▪) and transconjugants (▾) bacteria were counted from feces samples at day 1, 2, 3 on selective MacConkey agar plates for each plasmid. CFUs from conjugation of pOX38 (FIG. 5.A), R6K (FIG. 5.B), TP114 (FIG. 5.C), pVCR94 (FIG. 5.D), R388 (FIG. 5.E) and RK24 (FIG. 5.F) are shown.

[0021] FIGS. 6.A to D. Effect of time between recipient and donor strains colonization on conjugation efficiencies. Sm-treated mice were fed with the recipient bacteria either 2 or 12 hours before the introduction of the donor strain. Conjugation efficiency of TP114 (FIG. 6.A) and R6K (FIG. 6.B) was followed throughout four days in the feces of 4 mice to evaluate the impact of recipient bacteria colonization prior to conjugation. The recipient's colonization was also followed with CFU from feces throughout the experiment with both TP114 (FIG. 6.C) and R6K (FIG. 6.D). The time points are given relative to the donor strain introduction at time=0 day.

[0022] FIG. 7. Gene annotation of TP114 as predicted by RAST, CDsearch and BLAST. TP114 was sequenced using both Illumina and Oxford Nanopore technologies and coding genes were first annotated using RAST. A locus tag was attributed to each CDS with the prefix TP114-0 and a number referring to gene order based on the starting position of TP114's sequence as deposited on genbank: MF521836.1. The annotation was further refined using CDsearch and BLAST to attribute putative functions to the genes. Names were attributed to genes based on their putative homolog. General functions were then manually attributed to different modules that mediate a specific function such as type 4 secretion system (T4SS), mating pair stabilization, mobilization, maintenance, regulation, selection and unknown function.

[0023] FIGS. 8.A to D. Sequence homology between TP114 and other plasmids of the IncI family. Sequence homology was evaluated using BRIGG, a BLAST-like program that shows sequence identity in circular pattern. Sequence identity threshold were set at 100%, 70% and 50% for all analysis. TP114's sequence was first compared to seven members of the IncI2 subfamily based on the nucleic acid sequence (FIG. 8.A), and the amino acid sequence of its coding genes (FIG. 8.B). Gene conservation among IncI2 plasmids is also compiled in Table 6. TP114 was then compared to seven members of the IncI1 subfamily based on the nucleic acid sequence (FIG. 8.C), and the amino acid sequence of its coding genes (FIG. 8.D). Homology regions for the IncI1 subfamily only comprised the repA replication initiation gene, the shufflon and its associated shufflase rd. Numbers on homology rings correspond to the plasmids in the legend with 1 being the innermost ring and 7 being the outermost ring.

[0024] FIG. 9 High-density transposon mutagenesis (HDTM) experiment overview. An EcN containing TP114 was bombarded with transposons using MFDpir+ containing pFG051 (SEQ ID NO: 147) (a mobilizable Tn5 transposition plasmid) and pFG036 (SEQ ID NO: 146) (a plasmid repressing Tn5 transposon machinery in the donor strain). This resulted in the random insertion of Tn5 in both EcN's chromosome and TP114, generating HDTM Library 1. A conjugation experiment both in vitro (on solid support) and in vivo (in the murine gut) was performed to select for TP114::Tn5 mutants that were still able to transfer in those specific environments. The in vivo transfer of HDTM Library 1 was carried for 2 days in two mice per biological replicate Two HDTM libraries were generated from this experiment: transconjugants retrieved from feces samples constituted the HDTM Library 4, whereas HDTM Library 6 is composed of transconjugants retrieved from the caecum of the mice. The in vitro transfer resulted in HDTM Library 2 which was again used as donors for in vitro solid mating (generating the HDTM Library 3) and in vivo conjugation in the gut (generating the HDTM Library 5 and 7 consisting of transconjugants found in the feces and in the caecum respectively). HDTM Library 8 was generated by conjugation of TP114::tetB (SEQ ID NO: 166) in HDTM Library 2 to investigate the exclusion mechanism of TP114.

[0025] FIG. 10 HDTM library analysis. HDTM libraries were sequenced and reads were used to precisely locate transposon insertion sites in TP114. Read mapping was then visualized the using UCSC Genome Browser. Black lines represents an insertion site, the height of the line represents the density of reads at a given position in TP114. Tracks shown are representative of the background noise found in the HDTM library 2 as compared with library 3. Data of biological replicate #2 is shown for HDTM Libraries 1, 2 and 3.

[0026] FIG. 11. Correlation between HDTM samples. The normalized number of reads mapped onto each 100 bp bin on TP114 was correlated between replicates and conditions using Pearson correlation. A grayscale was applied to the data in order to visually identify the samples which strongly correlates (1.0 in dark grey) or weakly correlates (0.0 in white) between each other. Samples were identified following a three numbers format X.X.X, where the first position refers to the HDTM library number, the second position refers to the biological replicate of the HDTM library, and the third number refers to the mouse identity when experiments were in vivo.

[0027] FIG. 12. Essential genes for plasmid maintenance. HDTM libraries were sequenced and reads were mapped based on their insertion point on TP114. Read mapping was then visualized using the UCSC Genome Browser. Vertical lines represent transposon insertion sites, with their respective height corresponding the density of reads at this position. The selected racks presents three biological replicates of HDTM library 1 that were analyzed for any reproducible drop in transposon insertion coverage. These low coverage regions were considered to represent essential maintenance genes. However, some genes contained low mappability regions, which also appeared as low coverage regions and were filtered out of the analysis. The remaining genes with low coverage are are shown within a dotted frame (see also Table 8) and considered important for plasmid maintenance.

[0028] FIGS. 13.A to D. Distribution of gene count ratios of HDTM libraries 2 and 3. This procedure was repeated to determine gene importance in HDTM library 4 to 7. Gene counts were first determined by calculating the normalized number of reads mapping within a given gene under a specific condition. Gene counts were then compared to the gene counts in HDTM Library 1 using the formula (gene count in condition X—gene count in condition 1)/gene count in condition 1. Max and average values, black and gray lines respectively, were calculated using a set of genes suspected to be essential in the test Library X but not in Library 1. The gene count ratio distribution is shown for HDTM Library 2 (FIG. 13.A) with the dashed section zoomed in (FIG. 13.B). The gene count ratio distribution is shown for HDTM Library 3 (FIG. 13.C) with the dashed section zoomed in (FIG. 13.D). All genes with a gene count ratio bellow the maximal value threshold were considered important in the given condition.

[0029] FIG. 14. pil genes are essential for transfer in vivo but not in vitro. The transposon insertion sites were mapped onto TP114 and visualized using the UCSC Genome Browser. Transposon insertion density is shown both for in vitro and in vivo conjugation experiments. Black lines represent insertion sites, and their height represent read density at a given position in TP114. Tracks shown represents HDTM Libraries 1, 3, 6 and 7 for biological replicate 2. While HDTM Library 1 shows the complete insertion profile for conjugation results in vitro, HDTM Library 3 shows insertion densities after two in vitro conjugation and HDTM Library 6 and 7 shows the effect of in vivo conjugation on the insertion densities. Comparison of the tracks clearly reveals a diminution in insertion signal intensity for the pil genes only for the two in vivo conjugation experiments (genes in dashed selection). Gene essentiality for in vivo conjugation is summarized in Table 10.

[0030] FIG. 15. Distribution of core and essential genes of TP114 for maintenance, in vitro conjugation and in vivo conjugation. Data for the conservation of genes and for gene essentiality as determined by HDTM were mapped onto TP114's sequence. Only essential genes with high confidence (black) and core genes (grey) are shown. Gene functions were attributed based on FIG. 7.

[0031] FIG. 16.A to E. Effect of T4P abolition on mating pair stabilization of TP114 in vitro. The pilS gene was deleted and complemented in T4P mutants of TP114 for conjugation under solid support, liquid static and agitating liquid conditions (FIG. 16.A). Briefly, ˜10⁸ CFUs of KN01 strain containing either TP114ΔpilS::cat or TP114ΔpilS::cat+ pPilS were mixed with an equal amount of the recipient strain KN03 to assess the importance of the T4P on TP114 conjugation efficiency. The resulting mixtures were incubated on solid medium or in liquid with and without shaking for 2 hours at 37° C. Conjugants were then resuspended (solid) or diluted (liquid) in 800 μL total volume, and plated on LB medium with appropriate antibiotics to evaluate the proportion of transconjugants in the entire recipient cell population. Error bars show standard deviation of the mean from at least 3 biological replicates. Asterisk indicates that frequency of transconjugant formation was below the limit of detection (<10⁻⁸). The entire pilV gene or the shufflon, which can re-organize the C-terminus of pilV (including the 3′-end of the pilV gene), was replaced by a Flag tag to generate a second set of T4P mutants. A plasmid allowing the expression of a pilV variant (TP114ΔpilV::cat+pPilV4′) was able to complement this phenotype using the same experimental conditions as described above (FIG. 16.B). Each possibility of locked pilV variant was assessed for conjugation under solid support, liquid static and agitating liquid conditions under the same conditions as described above (FIG. 16.C to E, respectively).

[0032] FIGS. 17.A to C. Effect of T4P inactivation on TP114 in vivo transfer rates. The ability of a TP114ΔpilS mutant to transfer in vivo was compared to TP114. Briefly, groups of 5 mice were treated with 1 g/L of streptomycin two days prior to strain introduction. Mice were administered the recipient strain KN03 2 hours prior to donor strain introduction. The proportion of transconjugants per recipient bacteria was then monitored in feces for four days (FIG. 17.A). On the fourth day, mice were sacrificed and the proportion of transconjugants was compared between the caecum and the feces (FIG. 17.B). Error bars show standard deviation of the mean from at least 5 biological replicates. A similar experiment was conducted for TP114ΔpilV::cat as well as two locked pilV variants (TP114Δshufflon::pilV1-cat and TP114Δshufflon::pilV4′-cat, which respectively failed and succeeded conjugation in vitro to a E. coli recipient strain), thus revealing the essential role of specific pilV variants for conjugation towards a given target bacterium (FIG. 17.C).

[0033] FIGS. 18.A to D. Incompatibility and exclusion hinder the transfer of conjugative plasmids. Incompatibility and exclusion mechanisms are specific to each Inc plasmid families. KN02 containing TP114 was used as a donor for conjugation towards recipient bacteria bearing different plasmids (pOX38, R6K, TP114::tetB, pVCR94, R388, RP4). TP114's transfer rate into a recipient bacterium devoid of any conjugative plasmid is shown by the dotted line, with standard deviation shown in gray (FIG. 18.A). Exclusion ratios were calculated based on the data of panel A. Briefly, the conjugation frequency of TP114 into a recipient devoid of any conjugative plasmid was divided by the transfer rate into a recipient already containing a plasmid. In trans mobilization of pCloDF13 by TP114 into a recipient containing or not a copy of TP114 was also assesed (FIG. 18.B). Exclusion was then tested in vivo. Streptomycin-treated mice fed with either KN02+TP114::tetB (SEQ ID NO: 166) or KN02 first, and subsequently fed with KN01+TP114 2 hours later. The proportion of transconjugants per recipient cells in feces was then analyzed daily for four consecutive days (FIG. 18.C). On the fourth day, mice were sacrificed and the proportion of transconjugants per recipient bacteria was compared between caecum and feces (FIG. 18.D). Error bars show standard deviation of the mean from at least 3 biological replicates.

[0034] FIGS. 19.A to C. Exclusion is abolished in specific TP114 mutants from HDTM Library 8. TP114::tetB (SEQ ID NO: 166) was transferred by conjugation into a mutant pool from HDTM Library 1. The resulting transconjugants were referred to as HDTM Library 8, and were mostly deficient for exclusion. Individual HDTM Library 8 mutants were isolated and then used as donor strain to isolate exclusion deficient clones of TP114::Tn5. After two successive rounds of conjugative transfers, the ability of TP114::Tn5 to exclude TP114::tetB (SEQ ID NO: 166) was verified in a conjugation experiment between KN02+TP114::tetB (SEQ ID NO: 166) and KN01, KN01+TP114 or KN01+TP114::Tn5 as a recipient (FIG. 19.A). The exclusion ratio of TP114 or TP114::Tn5 was also compared to an empty recipient as previously described in FIG. 18 (FIG. 19.B). Finally, the capacity of a TP114::Tn5 mutant to transfer at expected rates was verified on solid medium for 2 hours at 37° C. using KN01 as the donor cell and KN03 as the recipient (FIG. 19.C). Error bars show standard deviation of the mean from at least 3 biological replicates.

[0035] FIG. 20. Genes limiting TP114's transfer efficiency. Transposon insertion sites were aligned onto TP114 and visualized using the UCSC Genome Browser. Representative insertion density tracks for in vitro (HDTM Library 3) and in vivo (HDTM Library 7) conditions are shown. Vertical black lines represents transposon density at a given position of the TP114 genome. The tracks shown represent HDTM Library step 1, 3 and 7 for biological replicate #2 as presented in FIG. 9. Only two genes showed enrichments from HDTM Library 1 to HDTM Libraries 3 and 7: TP114-005 (previously shown to mediate exclusion and a gain in conjugation frequency) and yaeC (a homolog of transcription repressor fin 0). Both genes are boxed in a dotted frame.

[0036] FIGS. 21.A to G. Plasmids and gRNAs used to test cargos Kill1 and Kill3. Maps of the Kill1 insertion device (FIG. 21.A), Kill3 insertion device (FIG. 21.B), pREC1 (SEQ ID NO: 160) (FIG. 21.C), pBXB1 (SEQ ID NO: 145) (FIG. 21.D) and pT (FIG. 21.E) are shown to scale. Total length in base pair (bp) is displayed bellow the plasmid name. gRNAs (an engineered fusion of the tracrRNA and the crRNA) from Kill3 are designed with the same promoters and terminators as Kill1's gRNA. The asterisks in the cat gene in pT's map represent the protospacer of the gRNAs. All gRNAs were designed to target cat, a chloramphenicol resistance gene, which was introduced in the target's genome or present on a plasmid. The gRNA's spacers sequences match the target sequence in the cat gene (FIG. 21.F). The complete nucleotide sequence of the cat gene (SEQ ID NO: 87) shows the location of gRNA 1 (SEQ ID NO: 88, light gray), gRNA 2 (SEQ ID NO: 89, gray) and gRNA 3 (SEQ ID NO: 90, dark gray) protospacers and their protospacer-associated motif (PAM) (framed with a solid line) (FIG. 21.G).

[0037] FIGS. 22.A to D. Introduction of a genetic cargo in the transfer machinery by Double Recombinase Operated Insertion of DNA (DROID). The DROID method is exemplified by the insertion of Kill1 in the transfer machinery TP114 (FIG. 22.A). The first step is to insert the tetB loading dock in the transfer machinery by recombineering. Then, the Bxb1 integrase operates the fusion between the attB and attP sites located on the loading dock and on the genetic cargo insertion device respectively. Lastly, a FLP recombinase is expressed to knock out the insertion device segment between the two newly joined FRT sites (tetB, pSC101ts and the attL site). PCR verifications for the recombineering (FIG. 22.B), the DROID step 1 (FIG. 22.C) and the DROID step 2 (FIG. 22.D) are shown for Kill1's insertion. Amplicons of each lanes are identified on the drawings in bold letters or numbers except for lane D which is the right junction between tetB and TP114 in TP114::tetB.

[0038] FIGS. 23.A and B. Examples of conjugative delivery system configurations. The bacterium can be decomposed into several components organized hierarchically (FIG. 23.A). The genetic cargo can be delivered in several configurations, three of which are shown in example III (FIG. 23.B). The first approach is to deliver a genetic cargo by cis mobilization, where the genetic cargo is directly inserted in the transfer machinery to form a single vector encoding the Conjugative Delivery System. A second method is to deliver the genetic cargo through constrained cis mobilization, where the essential replication genes are relocated in the chromosome of the donor bacterium to prevent replication of the Conjugative Delivery System outside the donor strain. Finally, the genetic cargo and Transfer machinery can be encoded on two or more vectors to allows in trans mobilization. In this set-up, the genetic cargo needs a transport module which is recognized by the transfer machinery and mediates its transfer from the donor strain to the recipient strain. Each delivery mode presents different levels of biosafety, which are represented by an X (not biocontained), a + (contained) and a ++ (more strictly contained). Replication and transfer capacity in both the donor and the recipient strains are shown by an X (not possible) or check marks (possible). Replication in the recipient for in trans mobilization is dependent on the maintenance module of the genetic cargo.

[0039] FIG. 24. Transformation efficiencies of Kill1 and Kill3 genetic cargos assessed by transformation into a recipient cell harboring a target plasmid (pT). 50 ng of each genetic cargo insertion device were electroporated in biological triplicates into KN03+pT and plated to select only the genetic cargo (black bars) or to select both the genetic cargo and pT (white bars). Transformation efficiencies are shown as transformants per mg of electroporated DNA. Error bars show standard deviation of the mean from at least 3 biological replicates. Asterisk indicates the absence of CFUs on plate.

[0040] FIGS. 25.A and 25.B. TP114::Kill1 to selectively eliminates a target bacterium from a mixed population in vitro. The COP is used for the specific targeting of an E. coli Nissle 1917 (FIG. 25.A) or Citrobacter rodentium (FIG. 25.B) carrying a chromosomal copy of the cat gene and this, in a mock bacterial population composed of three other Enterobacteriaceae. Equal amounts of each strain were mixed, and then incubated with the COP strain, or with KN01ΔdapA+TP114 control strain, for 2 hours on solid medium at 37° C. The graphic shows the relative abundance (%) of transconjugants for TP114::Kill1 as compared with TP114 for each strain of the mock population. In both cases, the abundance of the targeted strain transconjugants was specifically decreased by ˜1000 fold. Error bars show standard deviation of the mean from at least 3 biological replicates.

[0041] FIG. 26. Identification of the TP114 origin of replication (oriV) locus. The locus encoding the replication protein RepA was predicted in silico, and cloned in three different configurations in a pir-dependent plasmid backbone. “repA+up” corresponds to the repA coding sequence (CDS)+1,000 bp from the upstream region; “repA+down” represents the repA CDS and putative promoter+1,000 bp in the downstream region; “repA+both” encompasses the repA CDS+1,000 bp from the upstream and downstream regions. All three plasmid versions were transformed in a pir− or pir+ strain to test the activity of TP114 oriV. Only the repA CDS with both upstream and downstream regions could replicate in a pir− strain. Error bars show the standard deviation of the mean from 3 biological replicates.

[0042] FIGS. 27.A and 27.B. Constrained cis mobilization delivery can prevent plasmid persistence in the environment. TP114 and TP114ΔrepA::cat-oriV_{R6K} were transferred by conjugation from EC100Dpir+ towards a pir-devoid strain (black bars) and a pir+ strain (white bars) at 37° C. on solid LB medium for 2 hours. No transconjugant was detected for TP114ΔrepA::cat-oriV_{R6K} towards the pir-devoid strain (asterisk) and reduced frequency was observed for TP114ΔrepA::cat-oriV_{R6K} towards the pir+ strain. In stark contrast, wild-type TP114 could transfer at normal frequency (˜10⁻³) (FIG. 27.A). TP114 and TP114ΔrepA::cat-oriV_{R6K} were transferred by conjugation from KN05 towards a EC100Dpir+ strain (gray bars) at 37° C. on solid LB medium for 2 hours (FIG. 27.B). Under these conditions, both plasmids could conjugate at similar rates. Error bars show the standard deviation of the mean from 3 biological replicates.

[0043] FIGS. 28.A and 28.B. In trans mobilization of oriT_{TP114}-containing plasmids. Shuttle plasmid pNA01 contains oriT_{TP114} and therefore should be mobilizable by TP114. pNA02 presents a 7-bp deletion centered on the nicking site of oriT_{TP114}. In trans mobilization frequencies for plasmids pNA01 (FIG. 28.A) and pNA02 (FIG. 28.B) using a donor strain containing TP114 and a shuttle plasmid (either pNA01 or pNA02). Conjugation frequencies were calculated for transconjugants containing TP114 (black bars), the shuttle plasmid pNA01 or pNA02 (gray bars) and for transconjugants harbouring both TP114 and a shuttle plasmid (white bars). Error bars show the standard deviation of the mean from 3 biological replicates.

[0044] FIG. 29. Localization of TP114's origin of transfer (oriT) nicking site by pairwise sequence alignment. The oriT allows the recognition of a plasmid and is essential for mobilization. This recognition is based on the presence of repeats within the oriT sequence. The relaxosome then specifically binds the oriT and nicks (single strand break) the DNA to initiate conjugative transfer. TP114's oriT (SEQ ID NO: 141) was aligned with previously characterized R64 minimal oriT (SEQ ID NO: 142). Important repeats were mapped onto the alignment to allow for prediction of the nicking site. While sequence alignment was weak, repeats were present both in TP114 and R64, suggesting the putative localization of the nicking site. Lines ‘|’ represents a perfect sequence alignment, dots shows low similarity regions and a blank space ‘ ’ is a gap of a mismatch.

[0045] FIGS. 30.A and 30.B. Impact of the deletion of the origin of transfer (oriT) on TP114 conjugation frequency. The approximate location of the nicking site in TP114's oriT was deleted by recombineering, creating TP114ΔoriT. Conjugation frequency was first evaluated using transfers from E. coli MG1655Nx^{R} into E. coli MG1655Rf^{R} and compared to wild-type conjugation rates (FIG. 30.A). The transfer rate was drastically reduced in TP114ΔoriT, with residual transfer events (˜10⁻⁶) likely due to partial oriT recognition or by the presence of a cryptic oriT sequence in TP114. Transfer of TP114ΔoriT was then tested towards E. coli MG1655Rf^{R} and, no transconjugants were detectable (asterisk) (FIG. 30.B). Error bars show the standard deviation of the mean from 3 biological replicates.

[0046] FIG. 31. In trans-mobilization of shuttle plasmids pKN30 and pKN31 by a non-mobilizable transfer machinery. In trans mobilization frequencies for plasmids pKN30 (FIG. 28.A) and pKN31 (FIG. 28.B) using a donor strain containing both TP114 and a shuttle plasmid (either pKN30 or pKN31). Plasmids pKN30 and pKN31 are kanamycin resistant variants of pNA01 and pNA02, respectively. Both pKN30 and pKN31 contain TP114's oriT, but pKN31 has a 7-bp deletion in the nicking site region to prevent its transfer. Conjugation frequencies were calculated for transconjugants containing TP114ΔoriT::cat-tetB, the shuttle plasmid (pKN30 or pKN31) and for transconjugants harbouring both TP114 and a shuttle plasmid. Asterisk indicates that frequency of transconjugant formation was below the limit of detection (<10⁻⁸). Error bars show the standard deviation of the mean from 3 biological replicates.

[0047] FIG. 32. Schematic representation of in trans mobilization as described in Example III. The TP114 oriT sequence was identified in silico and cloned into pNA01. The oriT sequence is recognized by the TP114 nickase to mediate pNA01 in trans mobilization. However, a 7-bp deletion centered on the predicted nicking site (essential for nickase activity) prevents in trans mobilization of pNA02.

[0048] FIGS. 33.A and 33.B. The COP system can transfer DNA conferring a beneficial phenotype to a target bacterium in vivo. TP114 was used as a Conjugative Delivery System to transfer the kanamycin resistance gene to a target bacteriumin the gut of mice. Mice were fed with KN02 two hours prior to KN01+TP114 introduction. Proportion of recipient bacteria that have acquired the resistance phenotype (transconjugants) relative to total recipients was followed for 4 days in feces (FIG. 33.A). On the fourth day, mice were sacrificed and the proportion of transconjugants per recipients was compared in the caecum and in the feces (FIG. 33.B). Error bars show the standard deviation of the mean from 4 biological replicates.

[0049] FIGS. 34.A to D. Application of the conjugative probiotic (COP) as presented in the Example IV. The COP system is based on a probiotic cellular chassis delivering a genetic cargo by conjugative transfer. In the present example, the genetic cargo encodes CRISPR-Cas9 which can be transferred to a population of bacteria and target specific strains for elimination based on sequence specific criteria (FIG. 34.A). Conjugation is mediated by the transfer machinery encoded by a highly efficient conjugative plasmid, which in this example, directly harbours the genetic cargo hereby forming the conjugative delivery system. Conjugative plasmids are also usually modular, with genes grouped according to their function (FIG. 34.B). Once in the target cell, Cas9 endonuclease is expressed and assembles with the gRNA and scans the entire DNA content of the cell. Once a protospacer sequence is found downstream of a protospacer-adjacent motif (PAM) sequence, Cas9 mediates the double stranded cleavage of the DNA (FIG. 34.C). The bacterial COP can be used to selectively target cells in a complex microbial community. The bacterial COP will transfer the genetic cargo to recipient cells; however, the Cas9-gRNA system will only target specific strains from the community. If the target sequence is genomic, the target cells will die from DNA compromised genome integrity; if the target is plasmidic (e.g., virulence associated gene), the plasmid will be cured leading to target cell disarmament (FIG. 34.D).

[0050] FIGS. 35.A to D. COP can mediate loss of phenotypic traits through CRISPR-Cas9 extra-chromosomal sequence targeting. TP114 (control) or TP114::Kill1 was transferred from KN01 to KN02 (harbouring the target plasmid pT) within the mouse intestinal tract. Target strain disarming (pT plasmid curation) was followed through time in feces for 4 days by analyzing colony fluorescence on plate allowing growth of all target recipient cells (FIG. 35.A). One-way ANOVA was performed on the raw percentage of the four mice from the control group and three of the test group mice in response to the COP treatment. A representative image shows how green fluorescence was discernable between the colonies that had lost the plasmid and those who did not (FIG. 35.B). On the fourth day, plasmid curation results were compared in the feces and in the caecum of the mice and showed high consistency (FIG. 35.C). When selecting for transconjugants only, TP114::Kill1 achieved 100% disarming rates in all mice, but TP114 transfer showed no such activity (FIG. 35.D).

[0051] FIGS. 36.A to E. COPs can be administered prophylactically to prevent colonization by an invading strain in vivo. Schematic description of the experiment (FIG. 36.A). A probiotic donor strain bearing the TP114 plasmid with or without the CRISPR-Cas9 system (COP and control, respectively) was administered (˜10⁸ CFUs) 12 hours prior to the target/non-target strain mix. The abundance (FIGS. 36.B and D) and competitive index (FIGS. 36.C and E) of the target and non-target strains per mg of feces are presented as a function of time after gavage of the donor strain. The competitive index shows the relative abundance of the target or non-target bacteria. The dotted line in panel B and D is the upper limit for detection of CFU while the y axis is set to the lower limit of detection. In panel C and E, the dotted line represent a competitive ratio equivalent for both strains, in a situation where both strains would have exactly the same fitness.

[0052] FIGS. 37.A to E. COPs can be administered therapeutically to selectively eliminate a target strain in vivo. Schematic description of the experiment (FIG. 37.A). The target/non-target strain mix was administered (˜10⁸ CFUs) 12 hours prior to the probiotic donor strain bearing the TP114 plasmid with or without the CRISPR-Cas9 system (COP and control, respectively). The abundance (FIGS. 37.B and D) and competitive index (FIGS. 37.C and E) of the target and non-target strains per mg of feces are presented as a function of time after gavage of the target and non-target strain mix. The competitive index shows the relative abundance of the target or non-target bacteria. The dotted line in panel B and D is the upper limit for detection of CFU while the y axis is set to the lower limit of detection. In panel C and E, the dotted line represent a competitive ratio equivalent for both strains, in a situation where both strain would have exactly the same fitness.

[0053] FIGS. 38. A to C. The genetic cargo can generate beneficial and detrimental effects on bacterial populations. In this experiment, TP114::Kill3 encoded a kanamycin resistance gene and a CRISPR-Cas9 system targeting the gene responsible for chloramphenicol resistance. Both TP114::Kill3 and TP114 (control) were transferred by conjugation in a recipient bacterium bearing a target plasmid (pT). Plasmid curation efficiency was first monitored through antibiotics resistance where co-existence of the plasmid pT with TP114 or TP114::Kill3 was assessed. Co-selection of pT and TP114::Kill3 led to a clear drop in CFU which suggests that selection of the genetic cargo would lead to higher pT loss within the recipient bacteria population. Asterisk indicates that frequency of transconjugant formation was below the limit of detection (<10⁻⁸) (FIG. 38.A). Plasmid curation was then evaluated by quantifying the number of fluorescent colonies (containing the pT plasmid) while selecting the acquisition of the genetic cargo using kanamycin (FIG. 38.B). A representative picture of bacterial spots from serially-diluted conjugative mixtures after growth of target cells with kanamycin selection (FIG. 38.C). Error bars show the standard deviation of the mean from 3 biological replicates.

[0054] FIGS. 39.A and B. Conjugative transfer rates of several plasmids between the EcN donor and different recipient strains from various bacterial species. In vitro transfer of several conjugative plasmids spanning six incompatibility families towards strains representing some of the most infamous multidrug resistant Enterobacteriaceae species. Transfer experiments were performed both on agar (FIG. 39.A) and in broth (FIG. 39.B). Transfer frequency normalized on recipient CFUs is represented using a grayscale gradient. Data shown are the average of at least 3 biological replicates.

[0055] FIG. 40. Protection from restriction systems can be acquired through DNA modification. Restriction modification systems are a barrier to horizontal gene transfer. Using donor that possess a modification system compatible with the recipient's restriction system improves the conjugative efficiency. In the legend, MG1655=E. coli MG1655 and EcN=E. coli Nissle 1917. Transfer is done between the donor-recipient couple. Data shown are the average of at least 3 biological replicates.

### DETAILED DESCRIPTION

[0056] The present disclosure relates to the methods and systems for developing and using a conjugative bacterial cell specifically engineered to deliver a payload, such as a therapeutic genetic cargo, in vivo to a recipient bacterial host cell. In a specific embodiment, the conjugative bacterial cell can be used in vivo (e.g., in the gastro-intestinal tract environment or in the bladder, for example). In some embodiments, the conjugative bacterial cell can be used to (1) treat microbiota dysbiosis, (2) modify a microbiota to express beneficial factors, (3) suppress antibiotic resistance and/or the spread of antibiotic resistance, (4) eliminate a specific pathogen, and (5) suppress the expression of bacterial virulence factors.

[0057] As used in the context of the present disclosure, the term “derived” refers to the use of genetic material that has been obtained or modified from a naturally-occurring organism.

[0058] Components of the Conjugative Delivery System

[0059] The conjugative delivery system of the present disclosure comprises genetic elements present natively or genetically introduced in a bacterium allowing the bacterium to transfer in vivo its genetic cargo to a recipient bacterial cell. The conjugative delivery system comprises two main components: a transfer machinery (which includes the genetic elements required to transfer the genetic cargo) and the genetic cargo itself. The components of the transfer machinery can be located on one or more extrachromosomal vector and/or integrated in the bacterial's chromosome. The components of the transfer machinery can be located in cis or in trans with respect to each other. The genetic cargo has been genetically engineered in the conjugative bacterial host cell either by positioning a transport module in operative association with the payload module or by introducing an heterologous genetic cargo in the conjugative bacterial host cell. The genetic cargo which includes a transport module operatively associated with a payload module can be located on an extrachromosomal vector or integrated in the bacterial's chromosome. The transport module is “operatively associated” with the payload module which allows the transfer of the payload module when the proteins encoded by the mobilization module (e.g., the transport machinery) recognize and act upon the transport module. Therefore, on the genetic cargo, the payload module is located in cis to the transport module at a position allowing the transfer of the payload module when the proteins of the mobilization module associate with the transport module.

[0060] In an embodiment, the components of the transfer machinery and of the genetic cargo are exclusively located on one or more extrachromosomal vector. In a specific embodiment, the components of the transfer machinery and of the genetic cargo are located on a single extrachromosomal vector. In another embodiment, the components of the transfer machinery and of the genetic cargo are located on more than one extrachromosomal vectors. For example, the components of the transfer machinery and of the genetic cargo can be organized in two distinct chromosomal vectors as shown in FIG. 23A.

[0061] In another embodiment, the components of the transfer machinery and of the genetic cargo are/can be located exclusively in the bacterial's chromosome.

[0062] In yet a further embodiment, the components of the transfer machinery and of the genetic cargo are/can be located on one or more extrachromosomal vectors as well as in the bacterial's chromosome. For example, the components of the transfer machinery can be located exclusively in the bacterial chromosome and the components of the genetic cargo can be located exclusively in an extrachromosomal vector. In another example, some of the components of the transfer machinery can be located in the bacterial chromosome as well as in one or more extrachromosomal vectors while the components of the genetic cargo can be located exclusively in one or more extrachromosomal vector (such as, for example, the embodiments shown in FIG. 23B). In still another example, the components of the transfer machinery can be located exclusively in the bacterial chromosome while some of the components of the genetic cargo can be located in the bacterial chromosome and others can be located in one or more extrachromosomal vector. In still a further example, some of the components of the transfer machinery can be located in the bacterial chromosome as well as in one or more extrachromomal vectors while some of the components of the genetic cargo can be located in the bacterial chromosome and others can be located in one or more extrachromosomal vector.

[0063] As used herein, the term “genome” refers to the whole hereditary information of an organism that is encoded in the DNA including both coding and non-coding sequences. The term “module” refers to a group of genes that contribute to a same function. In an embodiment, all genes from a same module are physically linked (in cis) on the same DNA molecule. In yet another embodiment, the genes can be contained on more than one DNA molecule.

[0064] As used herein, the term “extrachromosomal vector” refers to a genetic element which is physically distinct from the bacterial genome. The extrachromosomal vector is usually capable of independent replication from the bacterial genome due to the presence of a vegetative replication module. In some embodiments, the extrachromosomal vector is a plasmid, such as, for example, a circular plasmid. Vectors can be circular plasmids, usually when it is intended that the vector is independently replicating from the genome of the donor bacterium, or vectors can be linear DNA molecules integrated in the genome of the donor bacterium. In embodiments in which more than one vector is present, they can be provided in the same or different forms.

[0065] In an embodiment the transfer machinery and the genetic cargo can be part of the same nucleic acid molecule or different nucleic acid molecules. The nucleic acid molecules can be circular or linearized (and intended for integration in the bacterial's chromosome).

[0066] The transfer machinery and the genetic cargo include modules comprising genes which can encode one or more proteins, variants thereof or fragments thereof. The protein can be a variant of a a protein known to be encoded by the module. A variant comprises at least one amino acid difference when compared to the amino acid sequence of the native/known protein. As used herein, a variant refers to alterations in the amino acid sequence that do not adversely affect the biological functions of the protein. A substitution, insertion or deletion is said to adversely affect the protein when the altered sequence prevents or disrupts a biological function associated with the heterologous protein. For example, the overall charge, structure or hydrophobic-hydrophilic properties of the protein can be altered without adversely affecting a biological activity. Accordingly, the amino acid sequence can be altered, for example to render the peptide more hydrophobic or hydrophilic, without adversely affecting the biological activities of the heterologous protein. The protein variants have at least 50%, 55%, 60%, 65%, 70%, 75%, 80%, 85%, 90%, 95%, 96%, 97%, 98% or 99% identity to the heterologous protein described herein. The term “percent identity”, as known in the art, is a relationship between two or more protein sequences or two or more nucleotide sequences, as determined by comparing the sequences. The level of identity can be determined conventionally using known computer programs. Identity can be readily calculated by known methods, including but not limited to those described in: Computational Molecular Biology (Lesk, A. M., ed.) Oxford University Press, N Y (1988); Biocomputing: Informatics and Genome Projects (Smith, D. W., ed.) Academic Press, N Y (1993); Computer Analysis of Sequence Data, Part I (Griffin, A. M., and Griffin, H. G., eds.) Humana Press, N J (1994); Sequence Analysis in Molecular Biology (von Heinje, G., ed.) Academic Press (1987); and Sequence Analysis Primer (Gribskov, M. and Devereux, J., eds.) Stockton Press, NY (1991). Preferred methods to determine identity are designed to give the best match between the sequences tested. Methods to determine identity and similarity are codified in publicly available computer programs. Sequence alignments and percent identity calculations may be performed using the Megalign program of the LASERGENE bioinformatics computing suite (DNASTAR Inc., Madison, Wis.). Multiple alignments of the sequences disclosed herein were performed using the Clustal method of alignment (Higgins and Sharp (1989) CABIOS. 5:151-153) with the default parameters (GAP PENALTY=10, GAP LENGTH PEN ALT Y=10). Default parameters for pairwise alignments using the Clustal method were KTUPLB 1, GAP PENALTY=3, WINDOW=5 and DIAGONALS SAVED=5.

[0067] The variant protein described herein may be (i) one in which one or more of the amino acid residues are substituted with a conserved or non-conserved amino acid residue (preferably a conserved amino acid residue) and such substituted amino acid residue may or may not be one encoded by the genetic code, or (ii) one in which one or more of the amino acid residues includes a substituent group, or (iii) one in which the mature polypeptide is fused with another compound, such as a compound to increase the half-life of the polypeptide (for example, polyethylene glycol), or (iv) one in which the additional amino acids are fused to the mature polypeptide for purification of the polypeptide. A “variant” of the protein can be a conservative variant or an allelic variant.

[0068] The protein can be a fragment of a protein encoded by one of the genes of the module or a fragment of a variant protein. In an embodiment, the fragment corresponds to the known/native protein to which the signal peptide sequence has been removed. In some embodiments, heterologous protein “fragments” have at least at least 100, 200, 300, 400, 500, 600, 700, 800, 900 or more consecutive amino acids of the protein. A fragment comprises at least one less amino acid residue when compared to the amino acid sequence of the known/native heterologous protein and still possess the enzymatic activity of the full-length heterologous protein. In an embodiment, the fragment corresponds to the amino acid sequence of the protein lacking the signal peptide. In some embodiments, fragments of the heterologous protein can be employed for producing the corresponding full-length heterologous by peptide synthesis. Therefore, the fragments can be employed as intermediates for producing the full-length proteins.

[0069] Conjugative Bacterial Cell

[0070] As used herein, the terms “conjugative bacterial (host) cell”, “recombinant bacterium” or “donor bacterium” refer to a bacterium capable of horizontal gene transfer via bacterial conjugation. As used in the context of the present disclosure the terms “bacterial conjugation”, “conjugation”, “conjugative transfer” or “transfer” refer to a mechanism of horizontal gene transfer where genetic material (referred to as the genetic cargo) is delivered from a donor bacterium to a target bacterium (also referred to as a recipient bacterial cell) through a conjugative pore forming a channel between the two bacterial cells. The conjugative bacterial cell can be, in some embodiments, modified prior to being used in conjugation so as to remove or inactivate one or more virulence factors. In some embodiments, the conjugative bacterial cell can be a probiotic bacterium which can be referred to as a “conjugative probiotic” or “COP”. As used herein, the term “probiotic” refers to a bacterium that, once administered in adequate amount and via adequate routes, has no detrimental effects and may also provide beneficial effects to its host.

[0071] The present disclosure thus provides a bacterium, which can be a probiotic, which has been genetically engineered to bear the conjugative delivery system of the present disclosure. Thus, the present disclosure also provides a process for obtaining the recombinant bacterium by introducing the conjugative delivery system of the present disclosure in a bacterium.

[0072] Bacterial genera referred to as probiotic to a human or animal subject and that could be the COP of the present disclosure include, but are not limited to, Bacillus sp., Bifidobacterium sp., Enterococcus sp., Escherichia sp., Lactobacillus sp., Lactococcus sp., Leuconostoc sp., Pediococcus sp. and Streptococcus sp. As such, the present disclosure provides a probiotic recombinant bacterium from the genus Bacillus sp., Bifidobacterium sp., Enterococcus sp., Escherichia sp., Lactobacillus sp., Lactococcus sp., Leuconostoc sp., Pediococcus sp. and Streptococcus sp. as well as a process for making such probiotic bacteria by introducing the conjugative bacterial vector or system in a probiotic bacterium of the genus Bacillus sp., Bifidobacterium sp., Enterococcus sp., Escherichia sp., Lactobacillus sp., Lactococcus sp., Leuconostoc sp., Pediococcus sp. or Streptococcus sp. Bacterial species which are considered probiotic to human subjects include, but are not limited to Bacillus coagulans (e.g., strain GBI-30 or 6086), Bifidobacterium animalis subsp. lactis (e.g., strain BB-12), Bifidobacterium longum subsp. infantis, Enterococcus durans (e.g. strain LAB18s), Escherichia coli (e.g., strain Nissle 1917), Lactobacillus acidophilus (e e.g., strain NCFM), Lactobacillus bifidus, Lactobacillus johnsonii (e.g., strain Lai, LCI or NCC533), Lactobacillus paracasei (e.g., strain Stl 1 or NCC2461), Lactobacillus plantarum (e.g., strain 299v), Lactobacillus reuteri (e.g., strain ATCC 55730, SD2112, Protectis, DSM 17938, Prodentis, DSM 17938, ATCC 55730, ATCC PTA 5289, RC-14), Lactobacillus rhamnosus (e.g., strain GG, GR-1) and Lactococcus thermophiles, Leuconostoc masenteroides (e.g. strain B7), Pediococcus acidilactici (e.g. strain UL5), and Streptococcus thermophilus. As such, the present disclosure provides a probiotic recombinant bacterium from the bacterial species which are considered probiotic to human subjects as well as a process for making such probiotic bacteria by introducing the conjugative bacterial vector or system in a probiotic bacterium of the strains of bacteria considered probiotic in humans. In a specific embodiment, the probiotic is from the genus Escherichia, for example the species Escherichia coli, e.g. E. coli Nissle 1917. The present disclosure provides a process for making such probiotic recombinant bacteria by introducing the conjugative bacterial vector or system in a probiotic species Escherichia coli, e.g. E. coli Nissle 1917.

[0073] Transfer Machinery

[0074] The conjugative bacterial host cell comprises a genetic cargo, a type IV secretion system module, a mobilization module and a mating pair stabilization module comprising a type IV adhesion pilus, the type IV adhesion pilus comprising an adhesin. In some embodiments, the modules that are not part of the genetic cargo can be organized into the transfer machinery.

[0075] The transfer machinery is responsible for allowing the formation of a conjugative pore and the subsequent physical transfer of the genetic cargo into the recipient bacterium. The transfer machinery includes genes and regulatory elements that are divided in different modules further described below. The genes present within those modules can optionally be organized in the form of one or more operons.

[0076] As used herein, the term “gene” refers to a nucleic acid molecule containing the sequence information necessary for expression of a protein or a non-coding RNA (e.g. tracrRNA, crRNA, gRNA, rRNA, tRNA, anti-sense RNA). When the gene encodes a protein, it includes the promoter and the structural gene open reading frame sequence (ORF), as well as other sequences involved in the expression of the protein. When the gene encodes a non-coding RNA, it includes the promoter and the nucleic acid that encodes the untranslated RNA. As indicated above, genes may be expressed in the form of one or more operons. As used herein, the term “operon”, as it is known in the art, is a functional unit containing a cluster of genes under the control of a single promoter.

[0077] The term regulatory element refers to promoters, activator/repressor binding sites, terminators, enhancers and the like. In an embodiment, more than one promoter is included in the bacterial conjugative delivery system of the present disclosure. In yet another embodiment, only one promoter is included in the conjugative delivery system of the present disclosure.

[0078] When present, a promoter can be constitutive or inducible. The terms “constitutive” and “inducible” refer to the dynamic state of expression. A constitutive expression is stable overtime whereas an inducible expression allows a significant change in the level of expression of a gene. An inducible expression can be achieved in various ways such as the activation of transcription by a transcription activator, the repression of transcription by a transcription repressor or the control of translation by a functional 5′ untranslated region commonly referred to as a riboswitch.

[0079] In an embodiment, the transfer machinery comprises a type IV secretion system (T4SS) module, a mating pair stabilization module and a mobilization module. In some embodiments, the transfer machinery can optionally comprise a transport module, a regulatory module, a vegetative replication module, a maintenance module, a selection module and/or an exclusion module.

[0080] The T4SS module includes genes and regulatory elements responsible for the formation of a type IV secretion system. The T4SS is a protein assembly capable of establishing a conjugation pore that forms a channel between the donor bacterium and the recipient bacterium. It is through this conjugation pore that the genetic cargo is transferred from the donor bacterium to the recipient bacterium. In some embodiments, the T4SS module (which can be heterologous to the conjugative bacterial cell) is integrated in the genome of the conjugative bacterial cell. In another embodiment, the T4SS module is located in one or more extrachromosomal vectors (such as plasmids) which may be endogenous or heterologous to the conjugative bacterial cell. The genes present in the T4SS module include, but are not limited to, one or more of virB1 (TP114-012: traB), virB2 (TP114-013: traC), virB3 (TP114-014: traD), virB4 (TP114-015: traE), virB5 (TP114-004: trbJ), virB6 (TP114-003: traA), virB7 (TP114-011: ygeA), virB8 (TP114-017: traG), virB9 (TP114-018: traH), virB10 (TP114-019: traI), virB11 (TP114-020: traJ) and/or virD4 (TP114-021: traK). As such, the T4SS module can include one or more genes encoding one or more proteins of a T4SS. In addition, one or more T4SS conjugative pore, as well as, one or more different types of T4SS can be encoded by the T4SS module and expressed by the donor bacterium. In an embodiment, the genes encoding the T4SS can be derived from one or more of the following family of bacterial conjugative plasmids MPF_{T}, MPF_{F}, MPF_{I}, MPF_{FATA}, MPF_{B}, MPF_{FA}, MPF_{G} and/or MPF_{C}. In another embodiment, the genes encoding the T4SS can be derived from one of the MPF_{T} family of bacterial conjugative plasmids. For example, the genes encoding the T4SS can be derived from the bacterial plasmid TP114. In another example, the genes encoding the T4SS can be derived from the bacterial plasmid R6K. In yet another embodiment, the genes encoding the T4SS can be derived from one of the MPF_{F} family of conjugative plasmids. In yet another embodiment, the genes encoding the T4SS can be derived from the bacterial vector F (or pOX38).

[0081] The transfer machinery also includes a mating pair stabilization module. The mating pair stabilization module includes genes and regulatory elements responsible for the stabilization of the physical interaction of the donor bacterium with the target bacterium. As shown in Example II below, stabilizing the interaction between the donor bacterium and the target bacterium favors maintaining a physical proximity necessary for the establishment of the T4SS conjugative pore, which is important for the subsequent transfer of the genetic cargo in an unstable environment (in vivo or liquid for example). The stabilization of the interaction between the donor bacterium and the target bacterium is particularly important in vivo (e.g., in the gastro-intestinal environment or the bladder) where perturbations could affect transfer from the conjugative bacterial cell to target bacterium. The mating pair stabilization module (which may be heterologous to the conjugative bacterial cell) can be integrated in the genome of the conjugative bacterial cell or located on one or more bacterial vectors.

[0082] The mating pair stabilization module includes genes and regulatory elements responsible for the formation of a type IV adhesion pilus. The mating pair stabilization module (which may be heterologous to the conjugative bacterial cell) can be integrated in the genome of the conjugative bacterial cell or located on one or more bacterial vectors. Type IV adhesion pilus, as used herein, are protein assemblies forming long thin filaments that protrude from, and retract into, bacterial cells. The presence of type IV adhesion pilus on the membrane of a donor bacterium is believed to facilitate the “capture” of a target bacterium by physically “grabbing” it and “pulling” it. The presence of type IV adhesion pilus on the membrane of a donor bacterium thus stabilizes the interaction of the donor bacterium with the target bacterium. Type IV adhesion pilus genes include, but are not limited to one or more of pilL (TP114-009), pilN (TP114-022), pilO (TP114-023), pilP (TP114-024), pilQ (TP114-025), pilR (TP114-026), pilS (TP114-027), pilT (TP114-028), traN, traB (TP114-012), pilU (TP114-029) and/or pilV (TP114-030). As such, the mating pair stabilization module can include one or more genes encoding one or more proteins of a type IV adhesion pilus. In addition, one or more type IV adhesion pilus, as well as, one or more different types of type IV adhesion pilus can be encoded by the mating pair stabilization module and expressed by the donor bacterium. In an embodiment, the genes encoding the type IV adhesion pilus can be derived from one of the following family of bacterial conjugative plasmids IncA, IncB/O (Inc10), IncC, IncD, IncE, IncF1, IncF2, IncG, IncHI1, IncHI2, IncI1, IncI2, IncJ, IncK, IncL/M, IncN, IncP, IncQ1, IncQ2, IncR, IncS, IncT, IncU, IncV, IncW, IncX1, IncX2, IncY, IncZ, ColE1, ColE2, ColE3, p15A, pSC101, IncP-2, IncP-5, IncP-7, IncP-8, IncP-9, Inc1, Inc4, Inc7, Inc8, Inc9, Inc11, Inc13, Inc14, Inc18. In another embodiment, the genes encoding the type IV adhesion pilus can be derived from one of the incompatibility family of bacterial conjugative plasmids capable belonging to the I-complex: IncI1, IncI2, Incly, IncB/O (Inc10), IncK and/or IncZ. In another embodiment, the genes encoding the type IV adhesion pilus can be derived from one of the IncI2 family of bacterial conjugative plasmids. For example, the genes encoding the the type IV adhesion pilus can be derived from the bacterial vector TP114.

[0083] The type IV adhesion pilus comprises an adhesin. Adhesin are proteins which can, when displayed on the surface of a donor bacterium membrane, interact with various molecules present on the outer membrane of a target bacterium (e.g., proteins, sugars, lipids). For example, the PilV adhesin from the IncI2 family of bacterial conjugative plasmids interacts with receptors such as lipopolysaccharides (LPS), which are molecules typically found on the outer membrane of Gram-negative bacteria. Hence, if a donor bacterium displays a PilV adhesin on its outer membrane, PilV will bind to the LPS of a Gram-negative target bacterium and stabilize the interaction of the two cells. Adhesins include, but are not limited to, one or more of pilV (TP114-030) from TP114, pilV from R64, traN from pOX38. In some embodiments, one or more adhesin, as well as, one or more different types of adhesin can be encoded by the mating pair stabilization module and expressed by the donor bacterium. In an embodiment, adhesins can be displayed on the surface of the donor bacterium by either being part of an accessory pili protein assembly (e.g., like type IV adhesion pilus), and/or by being part of a T4SS conjugative pili protein assembly, and/or by being part of any molecular complex allowing the adhesin to be displayed on the surface of the bacterium. In another embodiment, the genes encoding adhesins can be derived from one of the following family of bacterial conjugative plasmids IncA, IncB/O (Inc10), IncC, IncD, IncE, IncF1, IncF2, IncG, IncHI1, IncHI2, IncI1, IncI2, IncJ, IncK, IncL/M, IncN, IncP, IncQ1, IncQ2, IncR, IncS, IncT, IncU, IncV, IncW, IncX1, IncX2, IncY, IncZ, ColE1, ColE2, ColE3, p15A, pSC101, IncP-2, IncP-5, IncP-7, IncP-8, IncP-9, Mot Inc4, Inc7, Inc8, Inc9, Inc11, Inc13, Inc14, Inc18. In another embodiment, the genes encoding the type IV adhesion pilus can be derived from one of the incompatibility family of bacterial conjugative plasmids capable belonging to the !-complex: IncI1, IncI2, Incly, IncB/O (Inc10), IncK and/or IncZ. In yet another embodiment, the genes encoding the adhesins can be derived from one of the IncI2 family of bacterial conjugative plasmids. For example, the genes encoding adhesins can be derived from the bacterial vector TP114. In yet another embodiment, the genes encoding the adhesins can be derived from one of the IncFII family of bacterial conjugative plasmids. For example, the genes encoding adhesins can be derived from the bacterial vector pOX38. In yet another embodiment, the genes encoding the adhesins can be derived from one of the IncX family of bacterial conjugative plasmids. For example, the genes encoding adhesins can be derived from the bacterial vector pR6K.

[0084] Adhesin genes can optionally be rearranged by the presence of shufflons and the activity of a shufflase. A shufflon is a cluster of multiple DNA inversions segments which can be located in the 3′ end of an adhesin gene. Under the action of a shufflase, an enzyme with a recombinase activity, the sequential order of different segments of the shufflon can be randomly rearranged. Following this rearrangement, the one segment that aligns with the adhesin gene becomes the end of the adhesin gene. Therefore, when an adhesin gene is associated with a shufflon, the distal section of the gene is variable and can potentially be any of the different DNA inversions segments included in the shufflon. As a result, when an adhesin gene with a shufflon is transcribed and translated, the C-terminus end of the adhesin is also variable and corresponds to a shufflon's inversion segment that ends the adhesin gene. Each shufflon's segment confers specific binding affinities to the adhesin protein. For example, for the shufflon adjacent to the pilV adhesin gene of the IncI2 family of conjugative plasmids, each shufflon's segment confers to the PilV adhesin binding affinities to specific receptors. Therefore, when a shufflon segment is aligned to an adhesin gene, it modulates the binding affinity of the corresponding adhesin protein. When a donor bacterium displays an adhesin, a shufflon can thus be used to influence the stability of the interaction between the donor bacterium and the target bacterium. Shufflons include, but are not limited to the following DNA sequences Shufflase recognition sites 5′-GTGCCAATCCGGTNNNTGG-3′ (SEQ ID NO: 140, abbreviated srs), alternative ORF to be re-arranged (altORFs). As such, one or more genes encoding one or more adhesin proteins present in the mating pair stabilization module can possess a shufflon. In an embodiment, the DNA sequence of the shufflon can be derived from one of the following family of bacterial conjugative plasmids IncA, IncB/O (Inc10), IncC, IncD, IncE, IncF1, IncF2, IncG, IncHI1, IncHI2, IncI1, IncI2, IncJ, IncK, IncL/M, IncN, IncP, IncQ1, IncQ2, IncR, IncS, IncT, IncU, IncV, IncW, IncX1, IncX2, IncY, IncZ, ColE1, ColE2, ColE3, p15A, pSC101, IncP-2, IncP-5, IncP-7, IncP-8, IncP-9, Inc4, Inc7, Inc8, Inc9, Inc11, Inc13, Inc14, Inc18. In another embodiment, the DNA sequence of the shufflon can be derived from one of the incompatibility family of bacterial conjugative plasmids belonging to the I-complex: IncI1, IncI2, Incly, IncB/O (Inc10), IncK and/or IncZ. In another embodiment, the DNA sequence of the shufflon can be derived from one of the Inch family of bacterial conjugative plasmids. In yet another embodiment, the DNA sequence of the shufflon can be derived from one of the IncI2 family of bacterial conjugative plasmids. In yet another embodiment, the DNA sequence of the shufflon can be derived from the bacterial vector TP114.

[0085] When the gene encoding the adhesin comprises a shufflon, the mating pair stabilization module comprises one or more genes encoding a shufflase. Shufflases are recombinases capable of reorganizing the shufflon's DNA inversions segments which, as indicated above, can affect the binding activity and specificity of adhesin proteins. Shufflases include, but are not limited to one or more of rci (TP114-031). As such, the mating pair stabilization module can include the one or more genes encoding the one or more shufflase proteins. In addition, one or more shufflase, as well as, one or more different types of shufflase can be encoded by the mating pair stabilization module and expressed by the donor bacterium. In an embodiment, the genes encoding shufflases can be derived from one of the following family of bacterial conjugative plasmids IncA, IncB/O (Inc10), IncC, IncD, IncE, IncF1, IncF2, IncG, IncHI1, IncHI2, IncI1, IncI2, IncJ, IncK, IncL/M, IncN, IncP, IncQ1, IncQ2, IncR, IncS, IncT, IncU, IncV, IncW, IncX1, IncX2, IncY, IncZ, ColE1, ColE2, ColE3, p15A, pSC101, IncP-2, IncP-5, IncP-7, IncP-8, IncP-9, Inch, Inc4, Inc7, Inc8, Inc9, Inc11, Inc13, Inc14, Inc18. In another embodiment, the shufflon and/or shufflase can be derived from one of the incompatibility family of bacterial conjugative plasmids belonging to the I-complex: IncI1, IncI2, Incly, IncB/O (Inc10), IncK and/or IncZ. In another embodiment, the genes encoding the shufflases can be derived from one of the Inch family of bacterial conjugative plasmids. In yet another embodiment, the genes encoding the shufflases can be derived from one of the IncI2 family of bacterial conjugative plasmids. For example, the genes encoding shufflases can be derived from the bacterial vector TP114.

[0086] The mobilization module encodes a relaxosome, e.g., a protein complex capable of recognizing the transport module (an origin of transfer (oriT)) which is operatively associated with the payload module and subsequently transfers the genetic cargo through the conjugative pore into the recipient bacterium. The mobilization module (which can be heterologous to the conjugative bacterial cell) can be integrated in the chromosome of the conjugative bacterial cell or can be located on one or more bacterial vectors. The mobilization module includes, but are not limited to one or more of virC1 (TP114-68: parA), (TP114-41: nikB) and/or (TP114-42: nikA). The mobilization module can be derived from at least one of the following conjugative families MOB_{F}, MOB_{P}, MOB_{V}, MOB_{H}, MOB_{C} and/or MOB_{Q}. In another embodiment, the genes encoding the mobilization machinery can be derived from one of the MOB_{P} family of bacterial conjugative plasmids. For example, the genes encoding the mobilization machinery can be derived from the bacterial vector TP114. In yet another example, the genes encoding the mobilization machinery can be derived from the bacterial vector R6K. In another embodiment, the genes encoding the mobilization machinery can be derived from one of the MOB_{F} family of bacterial conjugative plasmids. For example, the genes encoding the mobilization machinery can be derived from the bacterial vector pOX38.

[0087] The transport module is a component of the genetic cargo which can also be present in the transfer machinery when the elements of the genetic cargo and of the transfer machinery are in cis organization. The transport module includes one or more functional DNA elements acting as an origin of transfer (ori7) of the genetic cargo into the recipient bacterium. The transport module may be heterologous to the conjugative bacterial cell. The transport module is cis-acting and is thus found on the genetic component (chromosome or extrachromosomal vector) comprising the genetic cargo. As indicated above, the transport module is acted upon by the mobilization module. As used in the context of the present disclosure, the term “mobilization” refers to the process by which a conjugative plasmid accomplishes the transfer, from a donor bacterium to a recipient bacterium, of a DNA molecule that contains an origin of transfer (oriT). The term “origin of transfer” (abbreviated ori7) refers to a DNA sequence that, when present in a DNA molecule, is recognized by the corresponding mobilization proteins and allows its mobilization.

[0088] The regulatory module, when present in the transport machinery, can include one or more genes and regulatory elements encoding one or more proteins or non-coding RNAs capable of regulating the expression of genes or capable of being used to regulate the expression of genes (e.g., an activator, a repressor, a riboswitch, CRISPR-Cas9, Zinc Finger Nuclease (ZFN), a TALE, taRNA). The regulatory module (which can be heterologous to the conjugative bacterial cell) can be integrated in the genome of the conjugative bacterial cell or located on one or more bacterial vector. In an embodiment, the regulatory genes and elements can be on a distinct nucleic acid molecule than the modules of the transfer machinery or of the conjugative delivery system. In another embodiment, the regulatory genes and elements can be isolated from different sources such as, but not limited to, the same plasmid as the other modules, another plasmid, a bacterial chromosome, a phage, a eukaryote chromosome, an archaebacterium. In yet another embodiment, the regulatory genes and elements can be engineered or evolved from naturally occurring genes. The regulatory proteins or non-coding RNAs encoded by the regulatory module can be used to induce or repress genes located on the chromosome of the bacterium hosting the delivery system, as well as to induce or repress genes located on any of the modules of the transfer machinery or of the genetic cargo. In an embodiment, the regulatory module includes one or more genes encoding a one or more regulatory proteins or non-coding RNAs such as, but not limited to, yajA (TP114-058), yafA (TP114-069), yaeC (TP114-070), yheC (TP114-085), fur, fnr, korA, acaCD, acr1, acr2, stbA, twrA, ResP, kfrA, ardK, Cas9, crRNA, ZFN, TALEN, taRNA, toehold switch, araC, tetR, lacI and/or lacIq.

[0089] When the transfer machinery is located (in total or in part) in an extrachromosomal vector, the extrachromosomal vector includes a vegetative replication module. The vegetative replication module of the transfer machinery can be the same or different from the vegative replication module of the genetic cargo. A vegetative replication module is required when the transfer machinery is located on one or more vector that replicate independently from the genome of the bacterial host. In that case, the one or more extrachromosomal vectors containing the transfer machinery need a vegetative replication module to replicate and be maintained in the bacterial host. The vegetative replication module comprises one or more functional DNA elements acting as an origin of vegetative replication (oriV). The oriV is a DNA sequence present on a genetic element that, when recognized by the replication machinery encoded by the maintenance module, allows a plasmid to replicate in a bacterial host. For versatile use, and for the maintenance of vectors in a large range of bacterial hosts, the oriV of the vegetative replication module can be a broad-host-range oriV (i.e. and oriV recognized by a broad range of bacterial host species). In some embodiments, where the maintenance of vectors needs to be restricted to a limited range of bacterial hosts, it may be preferable to use an oriV with a restricted or narrow host range (i.e. an oriV recognized by a limited range of bacterial host species).

[0090] When the transfer machinery is located (in totally or in part) on an extrachromosomal vector, the conjugative bacterial host cell includes a maintenance module (which can be considered, in some embodiments, part of the transfer machinery). The maintenance module includes proteins (referred to as replication machinery) capable of recognizing the oriV of the vegetative replication module and allows the replication of extrachromosomal vectors (e.g., plasmids) containing the vegetative replication module. The maintenance module includes proteins capable of recognizing the oriV of the vegetative replication module and allows the replication of plasmids containing the vegetative replication module. The maintenance module can be heterologous to the conjugative bacterial cell. When the maintenance of vectors needs to be restricted to the donor bacterium, it may be preferable to locate (e.g., integrate) the maintenance module into the donor bacterium chromosome. Alternatively, the maintenance module may be located on one or more extrachromosomal vector. The maintenance module can also comprise one or more genes and regulatory elements responsible for adequate DNA partitioning. The genes responsible for partitioning may include proteins responsible for equal segregation of plasmid copies into daughter cells, toxin and anti-toxin stabilization system and/or helicase and DNA primase which helps the replicative machinery in the replication of the plasmid. The proteins of the maintenance module include, but are not limited to one or more of proteins often annotated as repA (TP114-083: repA), TP114-082, parA (TP114-068: parA), parB, DNA primase (TP114-006: ygiA), a toxin (e.g. vcrx028 from pVCR94, TP114-051: ycfA from TP114), an antitoxin (e.g. vcrx027 from pVCR94, TP114-050: ycfB from TP114), DNA topoisomerases (TP114-035: ydiA and TP114-036: ydgA). As such, the maintenance module includes the one or more genes encoding the one or more proteins of the replicative machinery and can also include zero or more genes and regulatory elements coding for DNA partitioning protein. In addition, one or more replicative machinery, as well as, one or more different types of replicative machinery can be present in the maintenance module. In an embodiment, the maintenance module and/or the vegetative replication module can be derived from one of the following family of bacterial vectors IncA, IncB/O (Inc10), IncC, IncD, IncE, IncF1, IncF2, IncG, IncHI1, IncHI2, IncI1, IncI2, IncJ, IncK, IncL/M, IncN, IncP, IncQ1, IncQ2, IncR, IncS, IncT, IncU, IncV, IncW, IncX1, IncX2, IncY, IncZ, ColE1, ColE2, ColE3, p15A, pSC101, IncP-2, IncP-5, IncP-7, IncP-8, IncP-9, Inc1, Inc4, Inc7, Inc8, Inc9, Inc11, Inc13, Inc14 and/or Inc18. In an embodiment, maintenance module and/or the vegetative replication module can be derived from one of the IncI2 family of bacterial vectors. For example, maintenance module and/or the vegetative replication module can be derived from the bacterial vector TP114.

[0091] The transfer machinery can also include one or more selection module. The selection module includes one or more genes conferring a selectable trait for identifying bacteria bearing one or more modules of the transfer machinery. The selection module is operatively connected with the one or more bacterial vector and/or the integrated modules of the transfer machinery. The selection module of the transfer machinery can be the same or different from the selection module of the genetic cargo. The selectable trait can be, but is not limited to, an antibiotic resistance gene, a gene coding for a fluorescent protein (including a green fluorescent protein), an auxotrophic selection marker, a gene coding for a β-galactosidase (e.g., the bacterial IacZ gene), a gene coding for a luciferase, a gene coding for a chloramphenicol acetyltransferase (e.g., the bacterial cat gene), a gene coding for a β-glucuronidase.

[0092] The exclusion module, when present in the transfer machinery, includes one or more of genes encoding exclusion proteins. The exclusion module (which can be endogenous or heterologous to the conjugative bacterial cell) can be located in the bacterial chromosome or in one or more extrachromosomal vectors. Exclusion proteins limit the horizontal transfer of genetic material by rendering a bacterium resistant to conjugative plasmids. For example, a bacterium that expresses exclusion proteins (e.g., excAB) against a specific bacterial conjugative plasmid (e.g., R64) can no longer receive this plasmid through conjugation. This phenomenon can be used to avoid futile conjugative transfer between conjugative bacterial cell bacteria. For instance, if conjugative bacterial cell bacteria are designed to express an exclusion protein directed against their own transfer machinery used to propagate the genetic cargo, transfer between conjugative bacterial cell bacteria can no longer occur (or at significantly lower rates). Exclusion proteins include, but are not limited to one or more of TP114-05 from TP114, excA and excB from plasmid R64, trbK from RP4, traS and traT from plasmid F (pOX38). As such, the exclusion module can include one or more genes encoding one or more exclusion proteins. In an embodiment, the genes encoding exclusion proteins can be derived from one of the following family of bacterial conjugative plasmids IncA, IncB/O (Inc10), IncC, IncD, IncE, IncF1, IncF2, IncG, IncHI1, IncHI2, IncI1, IncI2, IncJ, IncK, IncL/M, IncN, IncP, IncQ1, IncQ2, IncR, IncS, IncT, IncU, IncV, IncW, IncX1, IncX2, IncY, IncZ, ColE1, ColE2, ColE3, p15A, pSC101, IncP-2, IncP-5, IncP-7, IncP-8, IncP-9, Inc1, Inc4, Inc7, Inc8, Inc9, Inc11, Inc13, Inc14, Inc18. In another embodiment, the genes encoding exclusion proteins can be derived from one of the IncI2 family of bacterial conjugative plasmids. For example, the genes encoding exclusion proteins can be derived from the bacterial vector TP114.

[0093] Genetic Cargo

[0094] The genetic cargo is intended to be delivered by the conjugative bacterial cell donor bacterium to a target bacterium via the transfer machinery. The genetic cargo includes genes and regulatory elements which are divided in different modules further described below. The genes present within those modules can optionally be organized in the form of one or more operons.

[0095] The genetic cargo comprises a payload module which is operatively associated with a transport module. The transport module is “operatively associated” with the payload module which allows the transfer of the payload module when the proteins encoded by the mobilization module associate with the transport module. The genetic cargo is heterologous to the conjugative bacterial host cell because at least one of the payload module or the transport module has been genetically introduced in the conjugative bacterial host cell in order to operatively associate the transport module with the payload module. The genetic cargo can optionally include a selection module, a vegetative replication module and/or a mobilization module.

[0096] The payload module can include, but is not limited to, genes, regulatory elements, non-coding RNAs (such as siRNAs, shRNAs and miRNAs for example), transposons, genomes (e.g., phage, or bacterial). In a specific embodiment, the payload module encodes a guide RNA (gRNA) and/or a CRISPR-array (crRNA and tracrRNA) that can be recognized and acted upon by the recipient cell. The payload module can encode for one or more proteins, and/or one or more non-coding genetic elements (such as RNA for example). The payload module can also be a combination of one or more genes, and/or regulatory elements, and/or non-coding RNA, and/or transposons, and/or genome.

[0097] In a specific embodiment, the payload module includes one or more heterologous genes encoding one or more heterologous proteins or functional RNA which are intended to be expressed in a recipient bacterium. In the context of the present disclosure, the expression of the heterologous gene(s) in the recipient bacterium can be beneficial, neutral or detrimental to the recipient bacterium. An heterologous gene is considered beneficially expressed in a recipient bacterium when its expression causes a biological advantage to the recipient bacterium. Beneficially expressed heterologous genes include, but are not limited to lacZ, lacy, lacA, galE, galT, galK, gadD, gadT, gadP, scrA, scrB, merA, AN-PEP. An heterologous gene is considered neutrally expressed in a recipient bacterium when its expression does not provide a biological advantage and also fails to provide a biological disadvantage to the recipient bacterium. Neutrally expressed heterologous genes include, but are not limited to, proteins exhibiting a therapeutic benefit to the subject having the recipient bacterium (e.g., therapeutic proteins such as eukaryotic growth factors, hormones (e.g., glucagon-like peptide-1 or GLP-1, insulin, etc.), cytokines including interleukins (e.g., interleukin 1, 2, 3, 4, 5, 6, 7, 8, 9, 10, 11, 12, 13, 14, 15, 16 or 17), and/or chemokines (e.g., CC chemokines, CXC chemokines, C chemokines or CX3C chemokines). An heterologous gene is considered detrimentally expressed in a recipient bacterium when its expression provides a biological disadvantage to the recipient bacterium (for example, a reduction in cell growth, an increase in sensitivity to an antibiotic and/or an increase in mortality). Detrimentally expressed heterologous gene include, but are not limited to, nucleases (for example, transcription activator-like effector nucleases (TALEN), zinc finger nucleases (ZFN) and clustered regularly interspaced short palindromic repeat (CRISPR) associated DNA-binding (Cas) proteins and analogs thereof, endonuclease restriction enzymes (e.g., ApaLI, BamHI, BgIII, DpnI, EcoR1, EcoRV, HindIII, PvuI, PvuII, XhoI), and toxins or protein toxic for the recipient bacterium (e.g. Lysins, Vcrx028, MazF, HicB, KikA, CcdB, microcins).

[0098] In a specific embodiment, the heterologous protein encoded by the payload module is a Cas protein or a Cas protein analog. As used in the context of the present disclosure, a Cas protein or an associated analog is an endonuclease capable of mediating a double-strand cut (either blunt or staggered) in a DNA molecule at the specific location where a CRISPR RNA (crRNA) localizes on the DNA molecule. The Cas protein can be a type I, type II, or type III CRISPR RNA-guided endonuclease. In the context of the present disclosure, a “Cas protein analog” refers to a variant of the Cas protein, or to a fragment of the Cas protein, capable of mediating a double-strand cut (either blunt or staggered) in a DNA molecule at the specific location where a CRISPR RNA (crRNA) localizes on the DNA molecule, or capable of mediating a single stand cut in a DNA or RNA molecule at the specific location where a CRISPR RNA (crRNA) localizes on the DNA or RNA molecule.

[0099] A Cas protein variant comprises at least one amino acid difference when compared to the amino acid sequence of the native Cas protein. As used herein, a variant refers to alterations in the amino acid sequence that does not adversely affect the biological functions of the Cas protein analog. A substitution, insertion or deletion is said to adversely affect the protein when the altered sequence prevents or disrupts a biological function associated with the Cas protein. For example, the overall charge, structure or hydrophobic-hydrophilic properties of the protein can be altered without adversely affecting a biological activity. Accordingly, the amino acid sequence can be altered, for example to render the peptide more hydrophobic or hydrophilic, without adversely affecting the biological activities of the Cas protein. The Cas protein variants have at least 50%, 55%, 60%, 65%, 70%, 75%, 80%, 85%, 90%, 95%, 96%, 97%, 98% or 99% identity to the Cas proteins described herein. The term “percent identity”, as known in the art, is a relationship between two or more polypeptide sequences or two or more polynucleotide sequences, as determined by comparing the sequences. The level of identity can be determined conventionally using known computer programs. Identity can be readily calculated by known methods, including but not limited to those described in: Computational Molecular Biology (Lesk, A. M., ed.) Oxford University Press, N Y (1988); Biocomputing: Informatics and Genome Projects (Smith, D. W., ed.) Academic Press, N Y (1993); Computer Analysis of Sequence Data, Part I (Griffin, A. M., and Griffin, H. G., eds.) Humana Press, N J (1994); Sequence Analysis in Molecular Biology (von Heinje, G., ed.) Academic Press (1987); and Sequence Analysis Primer (Gribskov, M. and Devereux, J., eds.) Stockton Press, NY (1991). Preferred methods to determine identity are designed to give the best match between the sequences tested. Methods to determine identity and similarity are codified in publicly available computer programs. Sequence alignments and percent identity calculations may be performed using the Megalign program of the LASERGENE bioinformatics computing suite (DNASTAR Inc., Madison, Wis.). Multiple alignments of the sequences disclosed herein were performed using the Clustal method of alignment (Higgins and Sharp (1989) CABIOS. 5:151-153) with the default parameters (GAP PENALTY=10, GAP LENGTH PEN ALT Y=10). Default parameters for pairwise alignments using the Clustal method were KTUPLB 1, GAP PENALTY=3, WINDOW=5 and DIAGONALS SAVED=5.

[0100] The variant Cas proteins described herein may be (i) one in which one or more of the amino acid residues are substituted with a conserved or non-conserved amino acid residue (preferably a conserved amino acid residue) and such substituted amino acid residue may or may not be one encoded by the genetic code, or (ii) one in which one or more of the amino acid residues includes a substituent group, or (iii) one in which the mature protein is fused with another compound, such as a compound to increase the half-life of the protein, or (iv) one in which the additional amino acids are fused to the mature protein for purification of the polypeptide. A “variant” of the Cas protein can be a conservative variant or an allelic variant.

[0101] The Cas protein analog can be a fragment of a known/native Cas proteins. Cas protein “fragments” (including baking enzyme “fragments”) have at least at least 100, 200, 300, 400, 500, 600, 700, 800, 900 or more consecutive amino acids of the Cas protein. A fragment comprises at least one less amino acid residue when compared to the amino acid sequence of the known/native Cas protein and still possess the endonucleic activity of the full-length Cas protein. In some embodiments, fragments of the Cas proteins can be employed for producing the corresponding full-length Cas proteins by peptide synthesis. Therefore, the fragments can be employed as intermediates for producing the full-length proteins. In some embodiments, the Cas protein fragments can have at least 50%, 55%, 60%, 65%, 70%, 75%, 80%, 85%, 90%, 95%, 96%, 97%, 98% or 99% identity to the Cas proteins described herein.

[0102] In an embodiment, the Cas protein is a Cas9 protein and allows for the formation of blunt ends at the cleavage site. In an embodiment, the Cas9 protein can be derived, for example, from Streptococcus pyogenes. The Cas9 protein acts in collaboration with a CRISPR RNA (crRNA) moiety and trans-activating CRISPR RNA (tracrRNA) moiety to specifically cleave double-stranded DNA. The crRNA moiety can be specific to a nucleic acid sequence in a double stranded DNA (present in the recipient bacterium for example), and in the presence of such nucleic acid sequence and the Cas9 protein, forms a duplex with the nucleic acid sequence to specifically direct the Cas9 endonuclease activity in the duplex region. The tracrRNA specifically binds to the Cas9 protein and allows a close association with the crRNA. In an embodiment in which the Cas9 protein is the heterologous protein, the payload module can also include a gene encoding the crRNA and/or the tracrRNA. In another embodiment in which the Cas9 protein is the heterologous protein, the payload module nucleic acid molecule can comprise a gene coding for a guide RNA (gRNA). The gRNA includes, on the same gene transcript, both a CRISPR RNA (crRNA) and trans-activating CRISPR RNA (tracrRNA).

[0103] In another embodiment, the Cas protein is a Cpf1 protein and allows for the formation of staggered ends at the cleavage suite. In an embodiment, the Cpf1 protein can be derived, for example, from Francissella novicida. Unlike the Cas9 protein, the Cpf1 protein only requires the presence of crRNA to mediate specific cleavage of the double stranded DNA. As such, in embodiments in which the Cpf1 protein is used as the Cas protein, the payload module includes a CRISPR RNA (crRNA) and does not need to include a trans-activating CRISPR RNA (tracrRNA).

[0104] The present disclosure provides that the crRNA found on the payload module is recognizable by the Cas protein. This means that the crRNA is able to direct the endonuclease of a type I or type II Cas protein to a specific location on a double stranded DNA molecule, or to direct the endonuclease of a type III Cas protein to a specific location on a RNA molecule. Since that, in such embodiments, what is required is that the crRNA forms a duplex at one or more specific location (e.g., one or more target location) in the recipient bacterium genome, or at one or more specific location on RNA molecules of the recipient bacterium, then the crRNA must be substantially complementary to the one or more target location on the genome in the recipient bacterium, or on RNA molecules present in the recipient bacterium. As used herein, the term “genome” includes the chromosomal and plasmidic DNA of a bacterium. As also used herein, the term “substantially complementary” refers to the sequence of the crRNA having a minimal level of complementary so as to allow it to form a specific duplex with the one or more target location in the recipient bacterium genome, or RNA molecules present in the recipient bacterium.

[0105] In one embodiment, the crRNA is substantially complementary to a target sequence present in single or multiple copies in the recipient bacterium. In such embodiment, the transfer of the genetic cargo in the recipient bacterium will allow for the expression of the crRNA (which will form a plurality of duplexes in the recipient bacterium) and the Cas protein in the recipient bacterium which will eventually lead to the formation of multiple double-strand DNA cuts in the target bacterial genome. These multiple double-strand DNA cuts will eventually lead to a reduction in the viability of the recipient bacterium, most likely, in the death of the recipient bacterium.

[0106] In embodiments in which killing of the recipient bacterium is not desired (for example to avoid inflammatory reactions triggered by the death of a population of recipient bacterium), the crRNA can be substantially complementary to a single location in the genome of the recipient bacterium, for example, a specific gene in a recipient bacterium. The payload module would also have to contain a DNA molecule that can be used as a template to repair the target locus and introduce an inactivating mutation that also can protect from the crRNA targeting. For example, the crRNA can be substantially complementary to a gene coding for a virulence factor in the recipient bacterium, or an RNA coding for a virulence factor in the recipient bacterium. In such embodiments, the introduction of the payload module will lead to the inactivation of the virulence factor by introducing the mutated reparation template into the virulence factor gene without altering the viability of the recipient bacterium or causing deleterious effects in the subject bearing the recipient bacterium. The virulence factor can be located on the chromosome of the recipient bacterium or on a plasmid of the recipient bacterium.

[0107] The virulence factor in the recipient bacterium can be for example a gene conferring resistance to a drug, such as, for example, an antibiotic. The term “antibiotic resistance gene” encompasses a gene, or the encoding portion thereof, which encodes a protein or transcribes a functional RNA that confers antibiotic resistance. For example, the antibiotic resistance gene may be a gene or the encoding portion thereof which contributes to (1) an enzyme which degrades an antibiotic, (2) an enzyme which modifies an antibiotic, (3) a pump such as an efflux pump for the antibiotic, or (4) a mutated target which suppresses the effect of the antibiotic. Gene coding for an antibiotic resistance trait include, but are not limited to, the aadA2, aadA, aacC, aacA1, aphA, strAB, pbp1A, pbp1B, pbp2A, pbp2B, dac, bla_{CMY-2}, floR, cmlA, cat, cmx, ermA, mph2, mel, erm(x), mecA, aadA1a, sul1, sul2, tetA, tet(W), blaSHV-1, dhfr, van(A), van(B) and bla_{NDM}1.

[0108] The virulence factor in the recipient bacterium can be, for example, a gene encoding a toxin. Gene coding for a toxin include, but are not limited to, ccdB, relE, parE, doc, vapC, hipA, stl, espA, pag, ctxA, ctxB, tcpA, exoU, exoS, exoT, SgiT and hipB.

[0109] The virulence factor can be a structure or a component, such as a pilus, a fimbriae, a flagella or pumps. Gene encoding for virulent component include, but are not limited to fimA, csgD, toxT, cps, ptk, epsA, mia, ssrB, acrA, acrB, tolC and csgA.

[0110] In a specific embodiment, the crRNA is specific to genes, or to RNA molecules derived from genes, coding for a virulence factor found in an Escherichia sp., such as, for example, a gene coding for a virulence factor in Escherichia coli. Virulence factors found in Escherichia coli include, but are not limited to, those described in WO2015/148680. In a specific embodiment, genes encoding a virulence factor include antibiotic resistance genes and shiga toxin genes in Escherichia coli (e.g., multidrug resistance shiga-toxin producing E. coli). In another specific embodiment, the genes encoding the virulence factor include gene coding for a pilus (e.g., for example a type 1 pilus) in Escherichia coli (e.g., adherent-invasive E. coli).

[0111] The transport module is a component of the genetic cargo and includes a functional DNA locus responsible for the physical transport of the genetic cargo into the recipient bacterium. The transport module comprises an origin of transfer (oriT), e.g., a nucleic acid sequence allowing the transfer of a vector from the donor bacterium to the recipient bacterium. The transport module may be heterologous to the conjugative bacterial cell. The transport module is cis-acting and is thus found on the genetic component (chromosome or extrachromosomal vector) comprising the genetic cargo. As indicated above, the transport module is acted upon by the mobilization module. As used in the context of the present disclosure, the term “mobilization” refers to the process by which a conjugative plasmid accomplishes the transfer, from a donor bacterium to a recipient bacterium, of a DNA molecule that contains an origin of transfer (oriT). The term “origin of transfer” (abbreviated oriT) refers to a DNA sequence that, when present in a DNA molecule, is recognized by the corresponding mobilization proteins and allows its mobilization.

[0112] The genetic cargo can also include one or more selection module. The selection module includes one or more genes conferring a selectable trait for identifying bacteria bearing one or more modules of the genetic cargo. The selection module is operatively connected with the one or more bacterial vector and/or the integrated modules of the genetic cargo. The selection module of the genetic cargo can be the same or different from the selection module of the conjugative delivery system. The selectable trait can be, but is not limited to, an antibiotic resistance gene, a gene coding for a fluorescent protein (including a green fluorescent protein), an auxotrophic selection marker, a gene coding for a β-galactosidase (e.g., the bacterial lacZ gene), a gene coding for a luciferase, a gene coding for a chloramphenicol acetyltransferase (e.g., the bacterial cat gene), a gene coding for a β-glucuronidase.

[0113] When the genetic cargo is located (in total or in part) in an extrachromosomal vector, the extrachromosomal vector includes a vegetative replication module. The vegetative replication module of the genetic cargo can be the same or different from the vegative replication module of the conjugative delivery system. A vegetative replication module is required when the transfer machinery is located on one or more vector that replicate independently from the genome of the bacterial host. In that case, the one or more extrachromosomal vectors containing the genetic cargo need a vegetative replication module to replicate and be maintained in the bacterial host. The vegetative replication module comprises one or more functional DNA elements acting as an origin of vegetative replication (oriV). The oriV is a DNA sequence present on a genetic element that, when recognized by the replication machinery encoded by the maintenance module, allows a plasmid to replicate in a bacterial host. For versatile use, and for the maintenance of vectors in a large range of bacterial hosts, the oriV of the vegetative replication module can be a broad-host-range oriV (i.e. and oriV recognized by a broad range of bacterial host species). In some embodiments, where the maintenance of vectors needs to be restricted to a limited range of bacterial hosts, it may be preferable to use an oriV with a restricted or narrow host range (i.e. an oriV recognized by a limited range of bacterial host species).

[0114] When the genetic cargo is located (in totally or in part) on an extrachromosomal vector, the conjugative bacterial host cell includes a maintenance module (which can be considered, in some embodiments, part of the transfer machinery). The maintenance module includes proteins (referred to as the replication machinery) capable of recognizing the oriV of the vegetative replication module and allows the replication of extrachromosomal vectors (e.g., plasmids) containing the vegetative replication module. The maintenance module includes proteins capable of recognizing the oriV of the vegetative replication module and allows the replication of plasmids containing the vegetative replication module. The maintenance module can be heterologous to the conjugative bacterial cell. When the maintenance of vectors needs to be restricted to the donor bacterium, it may be preferable to locate (e.g., integrate) the maintenance module into the donor bacterium chromosome. Alternatively, the maintenance module may be located on one or more of an extrachromosomal vector. The maintenance module can also comprise one or more genes and regulatory elements responsible for adequate DNA partitioning. The genes responsible for partitioning may include proteins responsible for equal segregation of plasmid copies into daughter cells, toxin and anti-toxin stabilization system and/or helicase and DNA primase which helps the replicative machinery in the replication of the plasmid. The proteins of the maintenance module include, but are not limited to one or more proteins often annotated as repA (TP114-083: repA), TP114-082, parA (TP114-068: parA), parB, DNA primase (TP114-006: ygiA), a toxin (e.g. vcrx028 from pVCR94, TP114-051: ycfA from TP114), an antitoxin (e.g. vcrx027 from pVCR94, TP114-050: ycfB from TP114), DNA topoisomerases (TP114-035: ydiA and TP114-036: ydgA). As such, the maintenance module includes the one or more genes encoding the one or more proteins of the replicative machinery and can also include zero or more genes and regulatory elements coding for DNA partitioning protein. In addition, one or more oriV and replicative machinery, as well as, one or more different types of oriV and replicative machinery can be present in the maintenance module. In an embodiment, the maintenance module and/or the vegetative replication module can be derived from one of the following family of bacterial vectors IncA, IncB/O (Inc10), IncC, IncD, IncE, IncF1, IncF2, IncG, IncHI1, IncHI2, IncI1, IncI2, IncJ, IncK, IncL/M, IncN, IncP, IncQ1, IncQ2, IncR, IncS, IncT, IncU, IncV, IncW, IncX1, IncX2, IncY, IncZ, ColE1, ColE2, ColE3, p15A, pSC101, IncP-2, IncP-5, IncP-7, IncP-8, IncP-9, Inc1, Inc4, Inc7, Inc8, Inc9, Inc11, Inc13, Inc14 and/or Inc18. In an embodiment, maintenance module and/or the vegetative replication module can be derived from one of the IncI2 family of bacterial vectors. For example, maintenance module and/or the vegetative replication module can be derived from the bacterial vector TP114.

[0115] The mobilization module encodes a relaxosome, e.g., a protein complex capable of recognizing the transport module (an origin of transfer (oriT)) which is operatively associated with the genetic cargo and subsequently transferring the genetic cargo through the conjugative pore into the recipient bacterium. The mobilization module (which can be heterologous to the conjugative bacterial cell) can be integrated in the chromosome of the conjugative bacterial cell or can be located on one or more bacterial vectors. The mobilization module includes, but are not limited to one or more of virC1 (TP114-68: parA), (TP114-41: nikB) and/or (TP114-42: nikA). The mobilization module can be derived from at least one of the following conjugative families MOB_{F}, MOB_{P}, MOB_{V}, MOB_{H}, MOB_{C} and/or MOB_{Q}. In another embodiment, the genes encoding the mobilization machinery can be derived from one of the MOB_{P} family of bacterial conjugative plasmids. For example, the genes encoding the mobilization machinery can be derived from the bacterial vector TP114. In yet another example, the genes encoding the mobilization machinery can be derived from the bacterial vector R6K. In another embodiment, the genes encoding the mobilization machinery can be derived from one of the MOB_{F} family of bacterial conjugative plasmids. For example, the genes encoding the mobilization machinery can be derived from the bacterial vector pOX38.

[0116] Configurations of the Conjugative Delivery System

[0117] In a specific embodiment, the conjugative delivery system is designed to provide cis mobilization to allow exponential dissemination of the genetic cargo. In such embodiment, all of the modules of the system are located on a single extrachromosomal vector (in some embodiments, a circular plasmid). Using a system based on cis mobilization provides very limited to no containment, allowing the transfer of the conjugative plasmid to the recipient cell and subsequent rounds of transfers from the recipient cell to other recipient cells as well as the replication of the conjugative plasmid in the recipient cells.

[0118] In another specific embodiment, the conjugative delivery system is designed to provide a constrained cis mobilization to allow rapid dissemination of the genetic cargo and provide a certain degree of containment. In such embodiment, the maintenance module is located in the conjugative bacterial cell's chromosomes and the remaining modules of the system are located on a single extrachromosomal vector (in some embodiments, a circular plasmid). Using a system designed to provide constrained cis mobilization offers some level of containment, allowing transfer of the conjugative plasmid to the recipient cell, and subsequent transfers from the recipient cell to other recipient cells, but preventing its replication in the recipient cells.

[0119] In a further specific embodiment, the conjugative delivery system is designed to provide in trans mobilization to increase the level of containment of the genetic cargo. In such embodiment, the entire transfer machinery is located in the conjugative bacterial cell's chromosomes or is located on one or many extrachromosomal vector (in some embodiments, a circular plasmid) but lacks the transport module. The modules of the genetic cargo (payload module and transport module) of the system are located on a single extrachromosomal vector (in some embodiments, a circular plasmid). In such embodiment, the genetic cargo would also include a vegetative replication module. Using a system designed to provide in trans mobilization offers the highest level of containment, preventing the transfer of the mobilized plasmid from a recipient cell to another recipient cell, and preventing replication in the recipient cells.

[0120] The modules of the genetic cargo can also be integrated in the bacterial chromosome. In such embodiment, the genetic cargo could either be excised or include a vegetative replication module upstream (in operative association) with the payload module.

[0121] The system of the present disclosure is designed to allow the transfer of a genetic cargo to a recipient bacterium in order to express one or more heterologous proteins and/or one or more non-coding DNA or RNA molecules, in the recipient bacterium. The system, when introduced in a donor bacterium, allows the genetic cargo to be transferred to target bacteria at an acceptable conjugation efficiency of in vivo (e.g. in the gastro-intestinal environment). As used in the context of the present disclosure, “conjugation efficiency” refers to a measure of the transfer of the genetic cargo from the donor bacterium to the recipient bacterium. A conjugation efficiency can be determined in vivo (e.g., in a subject) or in vitro (e.g., outside a subject, in a (liquid or solid) culture medium, for example) in numerous ways by the person skilled in the art. In embodiments in which the conjugation efficiency is measured in vivo, it can be provided as the number of bacterial exconjuguants (e.g., the number of bacteria that have received the genetic cargo from the conjugative bacterial cell bacterium) per total available recipient bacterium. Conjugation efficiency can be measured in a specific location in the subject, for example in the gut of the subject (and in such instance, a level of enteric conjugation efficiency is provided). As used in the context of the present disclosure, the expression “an acceptable level of in vivo conjugation efficiency” refers to a level of conjugation, observed in vivo, capable of providing sufficient transfer of the genetic cargo to mediate significant impact on, or by, the target cell population. In some embodiments, the system has an in vivo conjugation efficiency of at least 10⁻³, 10⁻² or 10⁻¹ transconjugant bacterium/recipient bacterium. In a specific embodiment, the system has an in vivo conjugation efficiency of at least 10⁻³ transconjugants bacterium/recipient bacterium. In a specific embodiment, the system has an in vivo conjugation efficiency of at least 10⁻² transconjugant bacterium/recipient bacterium. In a specific embodiment, the system has an in vivo conjugation efficiency of at least 10⁻¹ transconjugant bacterium/recipient bacterium.

[0122] As shown in the present disclosure, in some embodiments, conjugation efficiencies are compared in several mating conditions. As such, a measure of in vitro conjugation under certain conditions can be used as a proxy for determining if the in vivo transfer efficiency of a vector is acceptable. Consequently, in some embodiments, conjugation efficiency of the system under hypoxic conditions, presence of feces in the medium, physiologically relevant temperature (e.g., 37° C.), unstable mating environment (e.g. a static or agitating broth) is at least 10⁻³, 10⁻² or 10⁻¹ transconjugant bacterium/recipient bacterium as compared with standard solid medium mating. In a specific embodiment, the system has an in vitro conjugation efficiency, when measured in any of the above conditions, of at least 10⁻³ transconjugant bacterium/recipient bacterium. In a specific embodiment, the system has an in vitro conjugation efficiency, when measured in any of the above conditions, of at least 10⁻² transconjugant bacterium/recipient bacterium. In a specific embodiment, the system has an in vitro conjugation efficiency, when measured in any of the above conditions, of at least 10⁻¹ transconjugant bacterium/recipient bacterium.

[0123] In some embodiments, a ratio between the conjugative efficiency in a liquid medium vs. a solid medium can be used as a as a proxy for determining if the in vivo transfer efficiency of a vector is acceptable. As shown in the Examples below, a ratio of conjugative efficiency higher than 0.1, 0.2, 0.3, 0.4, 0.5, 0.6, 0.7, 0.8, 0.9 or 1.0% is indicative that the conjugative bacterium has acceptable in vivo transfer efficiency. In some embodiments, a ratio of conjugative efficiency higher than 0.1% is indicative that the conjugative bacterium has acceptable in vivo transfer efficiency.

[0124] The present disclosure also includes a method for determining the efficiency of in vivo transfer by measuring the ability of a bacterial system to conjugate in a liquid medium. Such method includes contacting a conjugative bacterial host cell and a recipient bacterial host cell in a liquid medium and determining the conjugation efficacy in such liquid medium. In an embodiment, the liquid medium has a viscosity substantially similar to water, when measured at a specific temperature (37° C. for example). If the conjugation efficacy is at least 10⁻³, 10⁻² or 10⁻¹ transconjugant bacterium/recipient bacterium as compared with standard solid medium mating, then it is determined that the conjugative bacterial cell will successfully be able to conjugate in vivo (in the gastro-intestinal tract of a subject for example). Alternatively or in combination, the method can include determining a ratio between the conjugative efficiency in a liquid medium vs. a solid medium. In such embodiment, a ratio of conjudative efficiency higher than 0.1, 0.2, 0.3, 0.4, 0.5, 0.6, 0.7, 0.8, 0.9 or 1.0% is indicative that the conjugative bacterium has acceptable in vivo transfer efficiency. The contact between the conjugative bacterial cell and the recipient bacterial cell can be done at a specific temperature which is the same or substantially similar to the in vivo environment, e.g., between 30 and 40° C. (37° C. for example). The contact between the conjugative bacterial cell and the recipient bacterial cell can be done in static conditions or in the presence of an agitation.

[0125] Probiotic Recombinant Donor Bacteria, Compositions Comprising Same and Processes for Making Same

[0126] The present disclosure also provides a recombinant bacterial host cell (referred to as a conjugative bacterial cell) that can act as a donor bacterium capable of conjugation to transfer the genetic cargo described herein into a target (recipient) bacterium. The conjugative bacterial cell bacterium comprises the transfer machinery and the genetic cargo described herein. In some embodiments, the transfer machinery and the genetic cargo can be independently replicating from the genome of the recombinant bacterium. In such embodiment, the transfer machinery can be operatively associated with the genetic cargo nucleic acid molecule and form, for example, a single unitary vector (e.g., a single plasmid). In another embodiment, the transfer machinery can be integrated in the chromosome of the conjugative bacterial cell bacterium (at a single location or at multiple locations) and the genetic cargo nucleic acid molecule can be independently replicating from the genome of the donor bacterium. In another embodiment the donor bacterium can comprise at least two distinct vectors (e.g., two distinct plasmids): a first one comprising the transfer machinery and a second one comprising the genetic cargo nucleic acid molecule.

[0127] Since the transfer machinery of the present disclosure has a high in vivo conjugation efficiency, the amount of conjugative bacterial cell bacteria necessary to achieve a desired therapeutic effect in the subject is going to be equal or lower than other recombinant bacteria lacking the system of the present disclosure.

[0128] In some embodiments, the conjugative bacterial cell can be a pathogenic bacterial cell that has been modified to reduce or eliminate its pathogenicity. Alternatively, the conjugative bacterial cell of the present disclosure is considered to be a probiotic bacterium since these are, at the very least, not harmful (e.g., not pathogenic) to the subject, and in some embodiments, probiotics can by themselves confer a health benefit to the subject. The present disclosure thus provides a bacterium which has been genetically engineered to bear the delivery system of the present disclosure. Thus, the present disclosure also provides a process for obtaining the conjugative bacterial cell by introducing the system of the present disclosure in a bacterial cell. Optionally, the system can include a gene conferring one or more selectable traits.

[0129] Bacterial cells that can be used as conjugative bacterial cells include, but are not limited to, Bacillus sp., Bifidobacterium sp., Enterococcus sp., Escherichia sp., Lactobacillus sp., Lactococcus sp., Leuconostoc sp., Pediococcus sp. and Streptococcus sp. As such, the present disclosure provides a probiotic recombinant bacterium from the genus Bacillus sp., Bifidobacterium sp., Enterococcus sp., Escherichia sp., Lactobacillus sp., Lactococcus sp., Leuconostoc sp., Pediococcus sp. and Streptococcus sp. as well as a process for making such probiotic bacteria by introducing the conjugative bacterial vector or system in a probiotic bacterium of the genus Bacillus sp., Bifidobacterium sp., Enterococcus sp., Escherichia sp., Lactobacillus sp., Lactococcus sp., Leuconostoc sp., Pediococcus sp. and Streptococcus sp. Bacterial species which as considered probiotic to human subjects include, but are not limited to Bacillus coagulans (e.g., strain GBI-30 or 6086), Bifidobacterium animalis subsp. lactis (e.g., strain BB-12), Bifidobacterium longum subsp. infantis, Enterococcus durans (e.g. strain LAB18s), Escherichia coli (e.g., strain Nissle 1917), Lactobacillus acidophilus (e e.g., strain NCFM), Lactobacillus bifidus, Lactobacillus johnsonii (e.g., strain Lai, LCI or NCC533), Lactobacillus paracasei (e.g., strain Stl 1 or NCC2461), Lactobacillus plantarum (e.g., strain 299v), Lactobacillus reuteri (e.g., strain ATCC 55730, SD2112, Protectis, DSM 17938, Prodentis, DSM 17938, ATCC 55730, ATCC PTA 5289, RC-14), Lactobacillus rhamnosus (e.g., strain GG, GR-1) and Lactococcus thermophiles, Leuconostoc masenteroides (e.g. strain B7), Pediococcus acidilactici (e.g. strain UL5), Streptococcus thermophilus. As such, the present disclosure provides, in some embodiments, a conjugative bacterial cell recombinant bacterium from the bacterial species which are considered probiotic as well as a process for making such probiotic bacteria by introducing the conjugative bacterial vector or system in a probiotic bacterium of the strains of bacteria considered probiotic in humans. In a specific embodiment, the probiotic is from the genus Escherichia, for example the species Escherichia coli, e.g. E. coli Nissle. The present disclosure provides a process for making such probiotic recombinant bacteria by introducing the conjugative bacterial vector or system in a probiotic species Escherichia coli, e.g. E. coli Nissle.

[0130] In an embodiment, the recombinant donor bacterium is an enteric recombinant bacterium because it is capable of colonizing the gastro-intestinal tract of the subject receiving the recombinant bacteria. In an embodiment, the enteric recombinant bacterium is capable of colonizing the stomach, the intestine (including the small and the large intestine) and/or the colon of the subject receiving the recombinant bacteria

[0131] In an embodiment, the recombinant bacterium can be formulated as a composition (which can be a probiotic composition). The composition can also comprise an excipient, one or more antibiotic(s), a selection pressure (for selecting the cells having the selectable trait) and/or one or more chemically active molecules, and/or one or more strains of probiotic (non-recombinant) bacterium. In the composition, the recombinant bacterium can be provided as a solution/suspension or in a dried form. The composition can be provided for administration by any routes and, in an embodiment, the composition can be provided for oral administration, for injection, for inhalation, etc. When the composition is intended for oral administration and is used with the intention of colonizing the gastro-intestinal tract of a subject, care should be taken to formulate the recombinant bacterium to preserve its viability and its ability to perform conjugation until it reaches the desired location (suspected of comprising the recipient bacterium).

[0132] The present disclosure thus provides a process for making the composition. Broadly, the process comprises combining the recombinant bacterium with an excipient and optionally additional probiotic bacteria and/or antibiotics and/or chemically active molecules. The process can comprise making a solution/suspension of the recombinant bacterium or drying the recombinant bacterium. When the composition is intended for oral administration, the process for making the composition and the excipient used in the composition are designed/selected for allowing oral administration.

[0133] Therapeutic Uses of Recombinant Bacterial Host Cells and Compositions Comprising Same

[0134] The recombinant conjugative bacterial host cell of the present disclosure acts as a donor bacterium to transfer the genetic cargo to a target (recipient) bacterium. The transfer can occur in a subject (human or animal) to which a conjugative bacterial cell is to be administered. The subject can be suspected or is known to bear the recipient bacterium. The subject can be a human subject or an animal subject (such as, for example, a non-human mammal). In an embodiment in which the recombinant bacterium is an enteric bacterium, the transfer is intended to occur in the gastro-intestinal tract of the subject.

[0135] In an embodiment, the recombinant bacterium is selected or engineered to have a modification module which is the same or similar to the restriction-modification system of the intended recipient bacterium. In bacteria, there are four known restriction-modification systems (type I, II, III and IV) involved in the bacterial defence system against foreign DNA. Similarity in modification module will facilitate the introduction of the genetic cargo molecule in the recipient bacterium by protecting the DNA from restriction, thus increasing conjugation efficiency. For example, in embodiments in which the recipient bacterium has a type I restriction-modification system, a recombinant bacterium having a similar type I modification system, for example a recombinant bacterium from the species Escherichia coli, can be selected and used. In an embodiment, the restriction modification system is endogenous to the donor bacterium and is part of the exclusion module. In another embodiment, the restriction modification system is heterologous to the donor bacterium and is incorporated in an exclusion module. In an embodiment, the restriction modification system of the donor bacterium and the restriction modification system of the recipient bacterium comprises/is a type I restriction modification system. In another embodiment, the restriction modification system of the donor bacterium and the restriction modification system of the recipient bacterium comprises/is a type II restriction modification system. In a further embodiment, the restriction modification system of the donor bacterium and the restriction modification system of the recipient bacterium comprises/is a type III restriction modification system. In yet another embodiment, the restriction modification system of the donor bacterium and the restriction modification system of the recipient bacterium comprises/is a type IV restriction modification system.

[0136] The present disclosure thus provides a method of transferring a genetic cargo from a donor bacterium to a recipient bacterium in the microbiota of a subject in need thereof. The transfer can be done in a liquid (urine or blood for example) or in a solid surface (an epithelium for example). The microbiota may be located on a solid surface (such as the gastro-intestinal epithelium, the bladder epithelium or the lung epithelium) or in a liquid (such as in the urine of the bladder or the urethra, the blood in a blood vessel, the gastric juices or the stomach or the lymph in a lymph node for example). The method comprises administering a therapeutically effective amount of the conjugative bacterial cell bacterium of the present disclosure to the subject in need thereof. As used in the context of the present disclosure, a therapeutically effective amount refers to an amount (dose) effective in mediating a therapeutic benefit to the subject. It is also to be understood herein that a “pharmaceutically effective amount” may be interpreted as an amount giving a desired therapeutic effect, either taken in one dose or in any dosage or route, taken alone or in combination with other therapeutic agents. The method can also comprise determining the presence of the recipient bacterium in the subject prior to the administration of the recombinant bacterium. The method can further comprise determining if the restriction-modification system of the recombinant bacterium is substantially similar to the restriction-modification system of the intended recipient bacterium.

[0137] Advantageously, as indicated above, since the system of the present disclosure has high in vivo conjugation efficiency, the amount of recombinant bacteria necessary to achieve a desired therapeutic effect in the subject receiving the recombinant bacterium is going to be lower than other recombinant bacterium lacking conjugative delivery system of the present disclosure.

[0138] In the embodiments in which the genetic cargo encodes for one or more heterologous protein, and/or a non-coding RNA, and/or a phage genome, and/or a bacterial genome, the recipient bacterium can be any type of bacterium present in the subject which would accept conjugation from the recombinant bacterium. In such instances, the recipient bacterium can be, for example, part of the enteric microbiota (which can be or not pathogenic to the subject) which include, but is not limited to Aeromonas sp., Bacillus sp., Bifidobacterium sp., Campylobacter sp., Citrobacter sp., Clostridium sp., Enterobacter sp., Escherichia sp., Klebsiella sp., Hafnia sp., Helicobacter sp., Lactobacillus sp., Lactococcus sp., Morganella sp., Plesiomonas sp., Proteus sp., Providencia sp., Pseudomonas sp., Salmonella sp., Serratia sp., Shigella sp., Staphylococcus sp., Vibrio sp. and Yersinia sp.

[0139] In an embodiment in which the genetic cargo encodes one or more heterologous proteins, the bacterium receiving the genetic cargo can subsequently express one or more heterologous proteins. For example, the recipient bacterium can express one or more of a eukaryotic growth factor, and/or hormone, and/or cytokine (including an interleukin and/or a chemokine). The expression of the heterologous protein is intended to provide a therapeutic benefit to the subject having received the recombinant bacterium. For example, when the therapeutic protein is a hormone, like a GLP-1 peptide, the present disclosure provides using the recombinant bacterium to prevent, treat or alleviate the symptoms associated with a condition which would benefit from an increase in GLP-1, such as, for example, diabetes. In another example, when the therapeutic protein is an interleukin, the present disclosure provides using the recombinant bacterium to prevent, treat or alleviate the symptoms associated with a condition which would benefit from an increase in interleukin, such as, for example, an inflammatory condition.

[0140] In an embodiment in which the heterologous protein encoded by the genetic cargo is a programmable nuclease, the recipient bacterium can be modified to express one or more of a TALEN, a zinc finger nuclease or a Cas protein. The expression of the programmable nuclease is intended to provide a therapeutic benefit to the subject having received the recombinant bacterium and being afflicted by the recipient bacterium. The administration of the conjugative bacterial cell recombinant bacteria can, for example, kill the recipient bacterium, sensitize the recipient bacterium to an antibiotic, or modify the recipient bacterium in order to suppress the expression of a protein, or a non-coding RNA, contributing to the pathogenicity. When the heterologous protein is a Cas protein, like a Cas9 protein, the present disclosure provides using the conjugative bacterial cell recombinant bacterium to prevent, treat or alleviate the symptoms associated with an infection or a dysbiosis caused by the intended recipient bacterium. In an embodiment, the infection and/or dysbiosis caused by the intended recipient bacterium is located in the gastro-intestinal tract and the recombinant bacterium is administered to prevent, treat or alleviate the symptoms of such infection and/or dysbiosis. For example, when the subject is infected with a multidrug resistant shiga toxin-producing E. coli, the recombinant bacterium can be used to restore drug sensitivity in the recipient bacterium and/or inhibit the expression of the shiga toxin. In yet another example, when the subject is afflicted by an adherent-invasive E. coli and is also afflicted by Crohn's disease or an inflammatory bowel disease linked to a dysbiosis, the recombinant bacterium can be used to inhibit the expression of an adhesion pilus to render the recipient bacterium less adherent to the gastro-intestinal wall and, in some embodiments, treat the dysbiosis. In still another example, when the subject is afflicted with a urinary tract infection or a blood septicemia linked to a dysbiosis, the recombinant bacterium can be used to inhibit the expression of an adhesion pilus or a virulence factor to render to recipient bacterium less virulent and, in some embodiments, treat the dysbiosis.

[0141] In an embodiment in which the genetic cargo encodes one or more non-coding RNA, the recipient bacterium can subsequently express one or more non-coding RNA. For example, the recipient bacterium can express one or more crRNA, and/or tracrRNA, and/or anti-sense RNA, and/or gRNA, and/or rRNA, and/or tRNA. The expression of the non-coding RNA is intended to provide a therapeutic benefit to the subject having received the recombinant bacterium. For example, when the therapeutic non-coding RNA is an antisens-RNA, it can knock down the expression of a virulence factor thus rendering the recipient unable to infect the subject.

[0142] In an embodiment in which the genetic cargo encodes one or more non-coding RNA and one or more heterologous proteins, the bacterium receiving the genetic cargo can subsequently express one or more non-coding RNA and one or more heterologous proteins. For example, the recipient bacterium can express one or more crRNA, and one or more Cas proteins. The expression of the crRNA and Cas protein is intended to provide a therapeutic benefit to the subject having received the conjugative bacterial cell recombinant bacterium. For example, the simultaneous presence of crRNA and Cas9 at specific loci in the recipient bacterium's genome will result in double-strand cleavage at those sites. These cuts will subsequently induce the death of the recipient bacterium.

[0143] The recombinant bacterium can optionally be used in combination with an antibiotic. Examples of antibiotics include, without limitation, aminoglycosides, ansamycins, carbapenems, cephalosporins, glycopeptides, lincosamides, lipopeptides, macrolides, monobactams, nitrofurans, oxazolidonones, penicillins, quinolones, sulfonamides, tetracyclines, and combinations thereof. Examples of aminoglycosides include, without limitation, amikacin, gentamicin, kanamycin, neomycin, netilmicin, tobramycin, paromomycin, spectinomycin and combinations thereofs. Examples of ansamycins include, without limitation, geldanamycin, herbimycin, rifaximin (streptomycin) and combinations thereof. Examples of carbapenems include, without limitation, ertapenem, doripenem, imipenem/cilastatina, Meropenem and combinations thereof. Examples of cephalosporins include, without limitation, cefadroxil, cefazolin, cefalotin or cefalothin, cefalexin, cefaclor, cefamandole, cefoxitin, cefprozil, cefuroxime, cefixime, cefdinir, cefditoren, cefoperazone, cefotaxime, cefpodoxime, ceftazidime, ceftibuten, ceftizoxime, ceftriaxone, cefepime, ceftaroline fosamil, ceftobiprole and combinations thereof. Examples of glycopeptides include, without limitation, teicoplanin, vancomycin, telavancin and combinations thereof. Examples of lincosamides include, without limitation, clindamycin, lincomycin and combinations thereof. An example of a lipopeptide includes, without limitation, daptomycin. Examples of macrolides include, without limitation, azithromycin, clarithromycin, dirithromycin, erythromycin, roxithromycin, troleandomycin, telithromycin, spiramycin and combinations thereof. An example of a monobactams includes, without limitation, aztreonam. Examples of nitrofurans include, without limitation, furazolidone, nitrofurantoin and combinations thereof. Examples of oxazolidonones include, without limitation, linezolid, posizolid, radezolid, orezolid and combinations thereof. Examples of penicillins include, without limitation, amoxicillin, ampicillin, azlocillin, carbenicillin, cloxacillin, dicloxaciUin, flucloxaciUin, mezlocillin, methicillin, nafcillin, oxacillin, penicillin G, penicillin V, piperacillin, penicillin G, temocillin, ticarcillin and combinations thereof. Examples of quinolones include, without limitation, ciprofloxacin, enoxacin, gatifloxacin, levofloxacin, lomefloxacin, moxifloxacin, nalidixic acid, norfloxacin, ofloxacin, trovafloxacin, grepafloxacin, sparfloxacin, temafloxacin and combinations thereof. Examples of sulfonamides include, without limitation, mafenide, sulfacetamide, sulfadiazine, silver sulfadiazine, sulfadimethoxine, sulfamethizole, sulfamethoxazole, sulfanamide (archaic), sulfasalazine, sulfisoxazole, trimethoprim-sulfamethoxazole(Co-trimoxazole) (TMP-SMX), sulfonamidochrysoidine(archaic) and combinations thereof. Examples of tetracyclines include, without limitation, demeclocycline, doxycycline, minocycline, oxytetracycline, tetracycline and combinations thereof.

[0144] The present invention will be more readily understood by referring to the following examples which are given to illustrate the invention rather than to limit its scope.

### EXAMPLE I—IN VITRO BACTERIAL CONJUGATIVE TRANSFER EFFICIENCY IS NOT PREDICTIVE OF IN VIVO BACTERIAL CONJUGATIVE TRANSFER EFFICIENCY

[0145] Strains, plasmids and growth conditions. All strains and plasmids used in this Example are described in Table 1. All oligonucleotide sequences are provided in Table 2. Cells were typically grown in Luria broth Miller (LB) or on Luria broth agar Miller medium supplemented, when needed, with antibiotics at the following concentrations: ampicillin (Ap) 100 μg/mL, chloramphenicol (Cm) 34 μg/mL, kanamycin (Km) 50 μg/mL, nalidixic acid (Nx) 4 μg/mL, spectinomycin (Sp) 100 μg/mL, streptomycin (Sm) 50 μg/mL, sulfamethoxazole (Su) 160 μg/mL, tetracycline (Tc) 15 μg/mL, and trimethoprim (Tm) 32 μg/mL. Diaminopimelic acid (DAP) auxotrophy was complemented by adding DAP at a final concentration of 57 μg/mL in the medium. All cultures were routinely grown at 37° C. Cells with thermosensitive plasmids (pSIM6, pCP20, pGRG36) were grown at 30° C. No bacterial cultures over 18 hours of age were used in the experiments.

TABLE 1
List of strains and plasmids used in the Examples.

| | | |
|---|---|---|
| Strain or plasmid | Relevent phenotype or genotype | Source/Reference |

Citrobacter rodentium

| | | |
|---|---|---|
| DBS100 | Murine enteric pathogen | ATCC 51459 |
| KN04 | DBS100, Sm^{R}, Cm^{R} | Example III |

Enterobacter aerogenes

| | | |
|---|---|---|
| ATCC 35029 | Synonym Klebsiella aerogenes, opportunistic pathogen | ATCC 35029 |

E. coli

| | | |
|---|---|---|
| BW25113 | F⁻, DE(araD-araB)567, lacZ4787(del)::rrnB-3, LAM⁻, | CGSC#: 7636 |
| | rph-1, DE(rhaD-rhaB)568, hsdR514 | |
| EC100Dpir+ | F− mcrA Δ(mrr-hsdRMS-mcrBC) ϕ80dlacZΔM15 | #ECP09500 (Lucigen) |
| | ΔlacX74 recA1 endA1 araD139 Δ(ara, leu)7697 galU | |
| | galK λ− rpsL nupG pir+ (DHFR) | |
| K-12 J53 | F⁺ met pro | DSM-4246 (DSMZ) |
| KN01 | Sm^{R}Sp^{R} Nissle 1917 | Example I |
| KN01ΔdapA | ΔdapA KN01 | Example I |
| KN02 | Sm^{R}Cm^{R} Nissle 1917 | Example I |
| KN03 | Sm^{R}Tc^{R} Nissle 1917 | Example I |
| KN05 | pir+ Nissle 1917 | Example III |
| MFDpir+ | MG1655 RP4-2-Tc::[ΔMu1::aac(3)IV-ΔaphA-Δnic35- | (Ferrière et al. 2010) |
| | ΔMu2::zeo] ΔdapA::(erm-pir) ΔrecA | |
| MG1655Nx^{R} | K-12 F− λ− ilvG− rfb-50 rph-1 Nx^{R} | (Ceccarelli et al. 2008) |
| MG1655Rf^{R} | K-12 F− λ− ilvG− rfb-50 rph-1 Rf^{R} | (Ceccarelli et al. 2008) |
| Nissle 1917 | Wildtype probiotic strain | DSM-6601 (DSMZ) |

Salmonella typhimurium

| | | |
|---|---|---|
| SR-11 | High virulence murine pathogen | (Benjamin et al. 1986) |

Plasmid

| | | |
|---|---|---|
| Kill1 Cargo insertion device (SEQ | oriV_{pSC101ts}, attP_{Bxb1}, FRT, 1 gRNA vs cat, aph-IIIa (Km^{R}), | Example III |
| ID NO: 143) | cas9 | |
| Kill3 Cargo insertion device (SEQ | oriV_{pSC101ts}, attP_{Bxb1}, FRT, 3 gRNA vs cat, aph-IIIa (Km^{R}), | Example III |
| ID NO: 144) | cas9 | |
| pBXB1 (SEQ ID NO: 145) | oriV_{pMB1}, bxb1 integrase, bla (Ap^{R}) | Example III |
| pCas9 | oriV_{pSC101ts}, flp, Ap^{R} | E. coli Genetic Stock Center |
| pE-FLP | oriV_{R101}, tetB, araC | Rodrigue Laboratory stock |
| pFG036 (SEQ ID NO: 146) | cl, tetM, oriV_{ColE1} | Example II |
| pFG051(SEQ ID NO: 147) | aad7, cat, Tn5 tnp, oriV R6K, oriT_{RP4} | Example II |
| pGRG36 | oriV_{pSC101ts}, oriT_{RP4}, insertion machinery, araC, Ap^{R} | Addgene #16666 |
| pGRG36-pir (SEQ ID NO: 148) | pGRG36 with pir insert | Example III |
| pGRG36-SmCm (SEQ ID NO: | pGRG36 with Sm^{R}Cm^{R} insert | Example I |
| 149) | | |
| pGRG36-SmSp (SEQ ID NO: | pGRG36 with Sm^{R}Sp^{R} insert | Example I |
| 150) | | |
| pGRG36-SmTc (SEQ ID NO: | pGRG36 with Sm^{R}Tc^{R} insert | Example I |
| 151) | | |
| pKD3 | oriV_{R6K}, FRT flanked Cm^{R}, Ap^{R} | E. coli Genetic Stock Center |
| pKD4 | oriV_{R6K}, FRT flanked Km^{R}, Ap^{R} | E. coli Genetic Stock Center |
| pKN02 (SEQ ID NO: 152) | bla, oriT_{RP4}, oriV_{R6K}, cas9, gRNA 1 | Example III |
| pKN30 (SEQ ID NO: 153) | oriV_{pBBR1}, aph-III, oriT_{TP114} | Example III |
| pKN31 (SEQ ID NO: 154) | oriV_{pBBR1}, aph-III, oriT_{TP114}Δnicking site | Example III |
| pNA01(SEQ ID NO: 155) | oriV_{pBBR1}, tetB, oriT_{TP114} | Example III |
| pNA02 (SEQ ID NO: 156) | oriVp_{pBBR1}, tetB, oriT_{TP114}Δnicking site | Example III |
| pNA22 (SEQ ID NO: 157) | oriV_{R6K}, cat, TP114 repA + 1,000 bp | Example III |
| pNA23 (SEQ ID NO: 158) | oriV_{R6K}, cat, 1,000 bp + TP114 repA | Example III |
| pNA24 (SEQ ID NO: 159) | oriV_{R6K}, cat, 1,000 bp + TP114 repA + 1,000 bp | Example III |
| pOSIP-TT | oriV_{R6K}, attB_{Bxb1}, tetB (Tc^{R}), FRT | Example III |
| pOSIP-TT | oriV_{pMB1}, bla, Biobrick | PMID: 21601683 |
| pPilS | oriV_{p15A}, cat, araC, P_{BAD}, pilS | Example II |
| pPilV4′ | oriV_{p15A}, cat, araC, P_{BAD}, pilV4′ | Example II |
| pRAD module G8-C1 | oriV_{pMB1}, cat, Biobrick | PMID: 21601683 |
| pREC1 (SEQ ID NO: 160) | oriV_{pSC101ts}, Lambda Red recombinase, Ap^{R} | PMID: 16750601 |
| pSB1A3 | oriV_{pBBR1}, Lambda Red recombinase, Cm^{R} | PMID: 16750601 |
| PSB1C3 | oriV_{pMB1}, araC controlled GFP, cat (Cm^{R}) | BBa_I746908 (IGEM) |
| pSIM6 | IPTG inducible expression plasmid | V36020 (THERMOFISHER) |
| pSIM7 | Conjugative plasmid | MF521836.1 |
| pT | TP114::tetB-Kill1 after FRT driven deletion of tetB and | Example III |
| | oriV_{pSC101ts}, | |
| pTRC-HisB | TP114::tetB-Kill3 after FRT driven deletion of tetB and | Example III |
| | oriV_{pSC101ts} | |
| TP114 (SEQ ID NO: 161) | TP114Δaph-III::tetB | Example III |
| TP114::Kill1(SEQ ID NO: 164) | TP114::tetB with Inserted Kill1 insertion device | Example III |
| TP114::Kill3 (SEQ ID NO: 165) | TP114::tetB with inserted Kill 3 insertion device | Example III |
| TP114::tetB (SEQ ID NO: 166) | TP114::tetB with oriT nicking site deletion | Example III |
| TP114::tetB-Kill1 (SEQ ID NO: | TP114ΔpilS::cat | Example II |
| 168) | | |
| TP114::tetB-Kill3 (SEQ ID NO: | TP114pilVΔshufflon-rci ::cat (C-terminal portion of pilV | Example II |
| 169) | replaced by a flag-tag) (SEQ ID NO: 170) | |
| TP114ΔoriT::cat-tetB | TP114ΔrepA::cat-oriV_{R6K} | Example III |
| (SEQ ID NO: 167) | | |
| TP114Δrci | TP114Δrcideletion mutant | Example II |
| TP114ΔpilV-rci | TP114ΔpilV-shufflon-rci deletion mutant | Example II |
| TP114pilVΔshufflon-rci | TP114pilVΔshufflon-rci replace by FLAG-tag | Example II |
| TP114Δshufflon::pilV1-cat | Locked pilV variant 1 | Example II |
| TP114Δshufflon::pilV2-cat | Locked pilV variant 2 | Example II |
| TP114Δshufflon::pilV3-cat | Locked pilV variant 3 | Example II |
| TP114Δshufflon::pilV3′-cat | Locked pilV variant 3′ | Example II |
| TP114Δshufflon::pilV4-cat | Locked pilV variant 4 | Example II |
| TP114Δshufflon::pilV4′-cat | Locked pilV variant 4′ | Example II |
| TP114Δshufflon::pilV5-cat | Locked pilV variant 5 | Example II |
| TP114Δshufflon::pilV5′-cat | Locked pilV variant 5′ | Example II |

[0146] DNA Manipulations.

[0147] A detailed list of oligonucleotide sequences used in this Example is found in Table 2. Plasmids were prepared using EZ10-Spin Column Plasmid Miniprep kit (BIOBASIC #BS614) whereas genomic DNA (gDNA) minipreps were prepared using Quick gDNA miniprep (ZYMO RESEARCH) according to the manufacturer's instructions. PCR amplifications were performed using Veraseq DNA polymerase (Enzymatics) or TaqB (Enzymatics) for DNA parts amplification and screening respectively. Digestion with restriction enzymes were incubated for 1 hour at 37° C. following manufacturer's recommendations. Plasmids were assembled by Gibson assembly using the NEBuilder Gibson Assembly mix (NEB) following manufacturer's protocol.

[0148] Recombineering.

[0149] All recombineering experiments were performed using pSIM6 as described previously (PMID: 16750601). Briefly, the E. coli strain containing pSIM6 was cultured at 30° C. until an optical density of 0.4 to 0.8 at 600 nanometers was reached. Then, the cells were heat-shocked for 15 minutes at 42° C., washed and the recombineering cassette was electroporated in the heat shocked E. coli cells. Cells were then incubated overnight at room temperature before plating on selective medium. The colonies were then screened by PCR to identify positive clones.

TABLE 2
Description of the oligonucleotides used in the Examples

| Purpose | Name | Sequence^{a,b} | Template | To amplify |
|---|---|---|---|---|
| pGRG_SmSp | oGSS1- | GGATCCTAGTAAGCCACGTTTTAATTAATCAGATCCCGGG | gBlock_16S_ | 16S tag |
| | F | CCTACGGGAGGCAGCAGTGG | tagR | |
| | | (SEQ ID NO: 29) | | |
| | oGSS1- | CGGGGAACTAGGAGGGTATGGTGCGCGCATGGAAA | | |
| | R | GACTACCAGGGTATCTAATCCTGTT | | |
| | | (SEQ ID NO: 30) | | |
| | oGSS2- | CGCACCATACCCTCCTAGTTCCCCGGTTATCTCTC | pFG051 | aad7 |
| | F | CTGTCTCTTATACACATCTGACGCT | (unpublished) | |
| | | (SEQ ID NO: 31) | | |
| | oGSS2- | GGGGTCGACGCGGCCGTGGCGCGCCTCCTAGGTGCTCGAG | | |
| | R | GCAAGCGAACCGGAATTGCC | | |
| | | (SEQ ID NO: 32) | | |
| pGRG_SmCm | oGSC1- | GATCCTAGTAAGCCACGTTTTAATTAATCAGATCCCGGGCTA | SXT | strA-strB |
| | F | GTATGACGTCTGTCGCAC | | |
| | | (SEQ ID NO: 33) | | |
| | oGSC1- | TGCTAGCTTTGAAAATTAAGAGGTATATATTATTGAATCGAAC | | |
| | R1 | TAATATTTTTTTTGGTG | | |
| | | (SEQ ID NO: 34) | | |
| | oGSC1- | GTGTCAACGTTTACAGCTAGCTCAGTCCTAGGTATTATGCTA | | Add P1-U8 |
| | R2 | GCTTTGAAAATTAAGAGG | | |
| | | (SEQ ID NO: 35) | | |
| | oGSC2- | TACCTAGGACTGAGCTAGCTGTAAA | pTRC-HTsB | lacl-P_{trc} |
| | F1 | CGTTGACACCATCGAATGGTGCAAAACCTTTCGCG | | |
| | | (SEQ ID NO: 36) | | |
| | oGSC2- | ATATCCCGAATGTGCAGTTAACGA | | |
| | F2 | CGTTGACACCATCGAATGGTGCAAAACCTTTCGCGG | | |
| | | (SEQ ID NO: 37) | | |
| | oGSC2- | TAATATATACCTCTTTAATTTTTAATAATAAAGTTAATCG | | |
| | R | (SEQ ID NO: 38) | | |
| | oGSC3- | TATTATTAAAAATTAAAGAGGTATATATTA | gBlock_ | NeonGreen |
| | F | ATGGTTTCTAAAGGAGAAGAAAAAAATATG | NeonGreen | |
| | | (SEQ ID NO: 39) | | |
| | oGSC3- | CCTCTTTCCACTGCTGCCTCCCGTAGGTTA | | |
| | R | TTTATATAATTCATCCATTQCCATAACATC | | |
| | | (SEQ ID NO: 40) | | |
| | oGSC4- | AGCATTTACAGATGTTATGGGAATGGATGAATTATATAAATAA | gBlock_16S_ | 16S tag |
| | F | CCTACGGGAGGCAGCAG | tagD | |
| | | (SEQ ID NO: 41) | | |
| | oGSC4- | ACCTCTTACGTGCCCGATCAACTCGAGGCATGCCTGCAG | | |
| | R | GACTACCAGGGTATCTAATCC | | |
| | | (SEQ ID NO: 42) | | |
| | oGSC5- | GAACAGGATTAGATACCCTGGTAGTCCTGCAGGCATGC | pSB1C3 | cat |
| | F | CTCGAGTTGATCGGGCACGTAA | | |
| | | (SEQ ID NO: 43) | | |
| | oGSC5- | GGTCGACGCGGCCGTGGCGCGCCTCCTAGGTGCTCGAG | | |
| | R | CTCGAGGCTTGGATTCTCACCA | | |
| | | (SEQ ID NO: 44) | | |
| | oGSC6 | GAGCTTGGCGTAATCATGGTCATAGCTGTTTCCTGTGTGA | PGRG36 | Screen |
| | -F | CGCTTAATGCGCCGCTACAG | bacbone | plasmid |
| | | (SEQ ID NO: 93) | | |
| | oGSC6- | CTGGTGAAAGTAAAAGATGCTGAAGATCAGTTGGGTGCAC | | presence |
| | R | CGCGCAATTAACCCTCACTA | | |
| | | (SEQ ID NO: 94) | | |
| pGRG_SmTc | oGST1- | GATCCTAGTAAGCCACGTTTTAATTAATCAGATCCCGGG | SXT | strA-strB |
| | F | CTAGTATGACGTCTGTCGCAC | | |
| | | (SEQ ID NO: 23) | | |
| | oGST1- | GTAGGTTATTTATATAATTCATCCATTCCCATAACATCTG | | |
| | R | TTTACAGCTAGCTCAGTCCT | | |
| | | (SEQ ID NO: 24) | | |
| | oGST2- | AAGCTAGCATAATACCTAGGACTGAGCTAGCTGTAAA | gBlock_16S_ | 16S tag |
| | F | CAGATGTTATGGGAATGGATGAA | tagD | |
| | | (SEQ ID NO: 25) | | |
| | oGST2- | CCCCAAAACTTTCCCCAAAACCCTTCCCCAAAACTGGCTAT | | |
| | R | ACTCGAGGCATGCCTGCAG | | |
| | | (SEQ ID NO: 26) | | |
| | oGST3- | GGATTAGATACCCTGGTAGTCCTGCAGGCATGCCTCGAGT | pFG018 | tetB |
| | F | ATAGCCAGTTTTGGGGAAGG | | |
| | | (SEQ ID NO: 27) | | |
| | oGST3- | GGGGTCGACGCGGCCGTGGCGCGCCTCCTAGGTGCTCGAG | | |
| | R | CTAGGTCGACGCTTGGATTC | | |
| | | (SEQ ID NO: 28) | | |
| dap A | oDTD1- | CGCGTGCCTCGGCAAAATGCCCTTCTGCTGCCAGTTTGCA | pKD4 | aph-IIIa |
| deletTon | F | GTGTAGGCTGGAGCTGCTTC | | |
| | | (SEQ ID NO: 45) | | |
| | oDTD1- | AAACGTACCATTGAGACACTTGTTTGCACAGAGGATGGCCC | | |
| | R | TGGGAATTAGCCATGGTCC | | |
| | | (SEQ ID NO: 46) | | |
| | oDTD2 | CA*A*A*TAGTTTGTTGTGTAATGGCATCAGACGCTGATTA | PrevTous | Add |
| | -F | ATAACGCGTGCCTCGGCAAAAT | | homology |
| | | (SEQ ID NO: 47) | | |
| | oDTD2 | AC*G*G*TTCTGTCTGCTTGCTTTTAATGCCATACCA | | |
| | -R | AACGTACCATTGAGACACTTGTTTGC | | |
| | | (SEQ ID NO: 48) | | |
| | oDTD3 | CCGTTTCTGCGGACTGGCTT | pKD4 | Screen dapA |
| | -int | (SED ID NO: 49) | | deletion |
| | oDTD2 | TAGCGGCTATCACCAACATC (SEQ ID NO: 50) | Nissle | Screen dapA |
| | 3-F | | 1917 | deletion |
| | oDTD3 | GTGAAGCGCCTTATGAACAATG (SEQ ID NO: 51) | | |
| | -R | | | |
| TP114 | oTPS1 | TGCTGAACCAGTAACAACCACC (SEQ ID NO: 67) | TP1141 bp | Sanger |
| sanger | -F | | sanger | sequencing |
| sequencing | | | | |
| | oTPS1 | GTCGCCGCTGTGGATTCAAC (SEQ ID NO: 68) | | TP114 |
| | -R | | | |
| | oTPS2 | GTTCAATACACATTACAGCCCACC (SEQ ID NO: 69) | TP11410 | Sanger |
| | -F | | kb sanger | sequencing |
| | oTPS2 | CTGCGCTCAAAGTCACGTATGG (SEQ ID NO: 70) | | TP114 |
| | -R | | | |
| | oTPS3 | TTACGCAACAGAATCTGAAAGCAC (SEQ ID NO: 71) | TP114 20 | Sanger |
| | -F | | kb sanger | sequencing |
| | oTPS3 | GAAGGTGGCCTGTCATCGAG (SEQ ID NO: 72) | | TP114 |
| | -R | | | |
| | oTPS4 | TGTCCGATTCGTCCTGGTTG (SEQ ID NO: 73) | TP114 25 | Sanger |
| | -F | | kb sanger | sequencing |
| | oTPS4 | GTATTTGTCCAGCGCCCGG (SEQ ID NO: 74) | | TP114 |
| | -R | | | |
| | oTPS5 | TTCAGATGCGTCGTGCAATG (SEQ ID NO: 75) | TP114 37 | Sanger |
| | -F | | kb sanger | sequencing |
| | oTPS5 | CACACTTGAGCGTCTTTCTGA (SEQ ID NO: 76) | | TP114 |
| | -R | | | |
| | oTPS6 | AGAAGCTCTTGAGTCCGACC (SEQ ID NO: 77) | TP114 42.5 | Sanger |
| | -F | | kb sanger | sequencing |
| | oTPS6 | GACTTATTCCGCCAACCCAAATT (SEQ ID NO: 78) | | TP114 |
| | -R | | | |
| | oTPS7 | GGCCCGCTCAAGGTCTTTC (SEQ ID NO: 79) | TP114 47 | Sanger |
| | -F | | kb sanger | sequencing |
| | oTPS7 | GCTGGAGAACACCCTGATTATGT (SEQ ID NO: 80) | | TP114 |
| | -R | | | |
| | oTPS8 | AAAGTTCTTTGCGCCTGTCATAGC (SEQ ID NO: 81) | TP114 50 | Sanger |
| | -F | | kb sanger | sequencing |
| | oTPS8 | GAAGCCAGGTTTGTTGCTGTG (SEQ ID NO: 82) | | TP114 |
| | -R | | | |
| | oTPS9 | TTTCTCTGCTACAGCATCTTTCTTC | TP114 52.5 | Sanger |
| | -F | (SEQ ID NO: 83) | kb sanger | sequencing |
| | oTPS9 | GGAACTGCCTCGGTGAAT (SEQ ID NO: 84) | | TP114 |
| | -R | | | |
| | oTPS10 | GGCATAAGGCGTGGACAATGG (SEQ ID NO: 85) | TP114 57.5 | Sanger |
| | 0-F | | kb sanger | sequencing |
| | oTPS10 | CAAACGTGCTAATCGCCTGGC (SEQ ID NO: 86) | | TP114 |
| | 0-R | | | |
| pBXB1 | oBXB1 | ATTTCCCCGAAAAGTGCCACCTGACGTCTAAGAAACCATT | gBIock- | bxb1 |
| | -F | CACGAGGCAGAATTTCAGAT (SEQ ID NO: 1) | Bxb1 | integrase |
| | oBXB1 | ATCCCCTGATTCTGTGGATAACCGTATTACCGCCTTTGAG | | |
| | -R | CGCCCTGCAGGAAATAATAA(SEQ ID NO: 2) | pSB1A3 | bla-oriV_{pMB1} |
| | oBXB2 | GATTATTAATCCGGCTTTTTTATTATTTCCTGCAGGGCG | | |
| | -F | CTCAAAGGCGGTAATACGGTT (SEQ ID NO: 3) | | |
| | oBXB2 | AAGCTAAGGATTTTTTTTATCTGAAATTCTGCCTCGTG | | |
| | -R | AATGGTTTCTTAGACGTCAGGT (SEQ ID NO: 4) | | |
| Kill3 | oKIL1- | AACCACCGCGGTCTCAGTGGTGTACGGTACAAACCCCGAC | pGRG36 | OriV_{pSc101ts} |
| Cargo | F | CGACAGTAAGACGGGTAAGC (SEQ ID NO: 5) | | |
| insertion | | | | |
| device | | | | |
| | oKIL1- | TATACTTTCTAGAGAATAGGAACTTCGGAATAGGAACTTC | | |
| | R | GGCTGAAAGCGCTATTTCTT (SEQ ID NO: 6) | | |
| | oKIL2- | AAGTTCCTATTCTCTAGAAAGTATAGGAACTTCGTG | pKNO2 | gRNA 1 |
| | F | CACTGATTAAGCATTGGTAACAGG | (unpub- | |
| | | (SEQ ID NO: 7) | lished) | |
| | oKIL2- | TTTCGGGACATTCAGGAGATTTTCGCCGGACGTACGCATT | | |
| | R | TTCAGCACACTGAGACTTGT (SEQ ID NO: 8) | | |
| | oKIL3- | AATGCGTACGTCCGGCGAAAATCTCCTGAATGTCCCGAAA | pKN02 | gRNA2 |
| | F | GGGCAGAAAGATGAATGACT (SEQ ID NO: 9) | (unpub- | |
| | | | lished) | |
| | oKIL3- | CTAAAACAGGGATTGGCTGAGACGAAA | | |
| | R | GAATCTATTATACAGAAAAATTTTCCTGAAAGC | | |
| | | (SEQ ID NO: 10) | | |
| | oKIL4- | TTCTGTATAATAGATTCTTTCGTCTCAGCCAATCCCT | pKNO2 | gRNA 2 |
| | F | GTTTTAGAGCTAGAAATAGCAAG | (unpub- | |
| | | (SEQ ID NO: 11) | lished) | |
| | oKIL4- | AACCGAGTGACCAAGAGAGGATGAAGCATTTGCCGAGTAG | | |
| | R | TTCAGCACACTGAGACTTGT (SEQ ID NO: 12) | | |
| | oKIL5- | CTACTCGGCAAATGCTTCATCCTCTCTTGGTCACTCGGTT | pKN02 | gRNA 3 |
| | F | GGGCAGAAAGATGAATGACTGTC (SEQ ID NO: 13) | (unpub- | |
| | | | lished) | |
| | oKIL5- | CTAAAACTATTGGCCACGTTTAAATCA | | |
| | R | GAATCTATTATACAGAAAAATTTTCCTGAAAGC | | |
| | | (SEQ ID NO: 14) | | |
| | oKIL6- | TTCTGTATAATAGATTCTGATTTAAACGTGGCCAATA | pKN02 | gRNA 3 |
| | F | GTTTTAGAGCTAGAAATAGCAAG | (unpub- | |
| | | (SEQ ID NO: 15) | lished) | |
| | oKIL6- | GTCGGAAAAGTGGCCATCATTTGACGAACTACAGCCCGGG | | |
| | R | TTCAGCACACTGAGACTTGT (SEQ ID NO: 16) | | |
| | oKIL7- | CCCGGGCTGTAGTTCGTCAAATGATGGCCACTTTTCCGACG | pKD4 | aph-IIIa |
| | F | GTGCTGACCCCGGATGAAT (SEQ ID NO: 17) | | |
| | oKIL7- | ATCATTCTATAGTATTAAGTATTGTTTTATGGCTGATAAA | | |
| | R | AGCGCTTTTGAAGCTGGGGT (SEQ ID NO: 18) | | |
| | oKIL8- | GTTCTTCGCCCACCCCAGCTTCAAAAGCGCT | pKN02 | cas9 |
| | F | TTTATCAGCCATAAAACAATACTTAATAC | | |
| | | (SEQ ID NO: 19) | | |
| | oKIL8- | CACCACTGAGACCGCGGTGGTTGACCAGACAAACCACGAC | | |
| | R | TCAGTCACCTCCTAGCTGAC (SEQ ID NO: 20) | | |
| Kill1 | oKIL9- | AAGTTCCTATTCTCTAGAAAGTATAGGAACTTCGTG | pKN02 | gRNA 1 |
| Cargo | F | CACTGATTAAGCATTGGTAACAGG | (unpub- | |
| insertion | | (SEQ ID NO: 21) | lished) | |
| device | | | | |
| | oKIL9- | GTCGGAAAAGTGGCCATCATTTGACGAACTACAGCCCGGG | | |
| | R | TTCAGCACACTGAGACTTGT (SEQ ID NO: 22) | | |
| pREC1 | oREC1 | GACGACGGCGGTCTCCGTCGTCAGGATCATCCGGGCGGA | pKD4 | oriV_{R6K} |
| | -F | GGATATTCATATGGACCATGG (SEQ ID NO: 52) | | |
| | oREC1 | TATACTTTCTAGAGAATAGGAACTTCGGAATAGGAACTTC | | |
| | -R | TTTTGCGGCCGCAAGATCCG (SEQ ID NO: 53) | | |
| | oREC2 | TATTCCGAAGTTCCTATTCTCTAGAAAGTATAGGAACTTC | pFG018 | tetB |
| | -F | ATAGCCAGTTTTGGGGAAGG (SEQ ID NO: 54) | | |
| | oREC2 | TCCTGACGACGGAGACCGCCGTCGTCGACAAGCCGGCCGA | | |
| | -R | CTAGGTCGACGCTTGGATTC (SEQ ID NO: 55) | | |
| TP114:: | oTPT1- | ACATGGCAAAGGTAGCGTTGCCAATGATGTTACAGATGAG | pREC1 | FRT-tetB- |
| tetB | F | CGGATCTTGCGGCCGCAAAA (SEQ ID NO: 56) | | att_{Bxb1} |
| | oTPT1- | GCCGATGCGCCAACCGCATTCATTAAAGACTAACTA | | |
| | R | CCATGGTCCATATGAATATCCTCC (SEQ ID NO: 57) | | |
| | oTPT2- | GAGCCATATTCAACGGGAAACGTC (SEQ ID NO: 58) | TP114:: | Screen tetB |
| | F | | tetB | insertion |
| | oTPT2- | CACATCGGTGAAAGCTATGCC (SEQ ID NO: 59) | | |
| | R | | | |
| Screen | oTPK1 | GCTCGCTTGGACTCCTGTTG (SEQ ID NO: 60) | pREC1 | screen:: |
| TP114::Kill | -F | | and | tetB in |
| | oTPK1 | CGTTGGCAAGACTGGCATGAT (SEQ ID NO: 61) | | |
| | -R | | | |
| | oTPK2 | TTGAAGGGTAGTCCAGAAGATAACG | TP114:: | Screen:: |
| | -F | (SEQ ID NO: 62) | Kill3 | Kill3/ |
| | | | or 1 | Kill1 |
| | | | | TP114 |
| | oTPK2 | GGTAAATGGCACTACAGGCGC (SEQ ID NO: 63) | | |
| | -R | | | |
| | oTPK3 | CCTGTTACCAATGCTTAATCAGTGCAC | TP114:: | Screen FRT |
| | | (SEQ ID NO: 64) | Kill3 | recombination |
| | | | or 1 | |
| | oTPK4 | GTGCACTGATTAAGCATTGGTAACAGG | TP114:: | Screen ARNg |
| | -F | (SEQ ID NO: 65) | Kill3 | number |
| | | | or 1 | |
| | oTPK4 | GGTCAGCACCGTCGGAAAAG (SEQ ID NO: 66) | | |
| | -R | | | |
| pNA22 | oNA1- | ATTACACGTCTTGAGCGATTCGCG | TP114 | repA + 1,000 |
| | F | ACTATCACCGGAAGAGCAGA (SEQ ID NO: 95) | | bp |
| | oNA1- | GAAGCAGCTCCAGCCTACACTCGAG | | |
| | R | TTTATTCCGCAAGTGATTAA (SEQ ID NO: 96) | | |
| | oNA2- | TTAATCACTTGCGGAATAAACTCGA | pKD3 | pKD3's |
| | F | GTGTAGGCTGGAGCTGCTTC (SEQ ID NO: 97) | | backbone |
| | oNA2- | TCTGCTCTTCCGGTGATAGTCGCG | | |
| | R | AATCGCTCAAGACGTGTAAT (SEQ ID NO: 98) | | |
| pNA23 | oNA3- | ATTACACGTCTTGAGCGATTCGCG | TP114 | 1,000 bp |
| | F | ATCCCCGGAATACAGCGTCAT (SEQ ID NO: 99) | | repA |
| | oNA3- | GAAGCAGCTCCAGCCTACACGAATT | | |
| | R | CTAGTGGGGTGGCGAAGCTG (SEQ ID NO: 100) | | |
| | oNA4- | CAGCTTCGCCACCCCACTAGAATTC | pKD3 | pKD3's |
| | F | GTGTAGGCTGGAGCTGCTTC (SEQ ID NO: 101) | | backbone |
| | oNA4- | ATGACGCTGTATTCCGGGGATCGCG | | |
| | R | AATCGCTCAAGACGTGTAAT (SEQ ID NO: 102) | | |
| pNA24 | oNA3- | ATTACACGTCTTGAGCGATTCGCG | TP114 | 1,000 bp |
| | F | ATCCCCGGAATACAGCGTCAT (SEQ ID NO: 103) | | repA + 1,000 |
| | oNA1- | GAAGCAGCTCCAGCCTACACTCGAG | | bp |
| | R | TTTATTCCGCAAGTGATTAA (SEQ ID NO: 104) | | |
| | oNA2- | TTAATCACTTGCGGAATAAACTCGA | pKD3 | pKD3's |
| | F | GTGTAGGCTGGAGCTGCTTC (SEQ ID NO: 105) | | backbone |
| | oNA4- | ATGACGCTGTATTCCGGGGATCGCG | | |
| | R | AATCGCTCAAGACGTGTAAT (SEQ ID NO: 106) | | |
| pGRG-pir⁺ | opir1-F | CCTAGTAAGCCACGTTTTAATTAATCAGATCCCGGG | ECWoDpir⁺ | pir |
| | | CATGAGTGGATAGTACGTTGCTAA | | |
| | | (SEQ ID NO: 107) | | |
| | opir1-R | GTCAGTTTAGGTTAGGCGCCATGCATCTCGAGGCTTGG | | |
| | | TCACCCCTTAGCTTTTTTGGGA (SEQ ID NO: 108) | | |
| | opir2-F | CCAAGCCTCGAGATGCATGG (SEQ ID NO: 109) | pFG018 | rrnB |
| | | | | terminator |
| | opir2-R | CGCGGCCGTGGCGCGCCTCCTAGGTGCTCGAG | | |
| | | GGACGTCTAAGAAACCATTATTATCATG | | |
| | | (SEQ ID NO: 110) | | |
| | opir3-F | GATGCTGGTGGCGAAGCTGT (SEQ ID NO: 111) | att_{BTn7} | ScreenpGRG |
| | | | | integrations |
| | opir3-R | GATGACGGTTTGTCACATGGA (SEQ ID NO: 112) | pir | |
| | opir3-in | ACGTCCATCATGACCTTGAGTCTCAT | | |
| | | AAAAAAACCTCATCATTCTGTATATCTTAACGCC | | |
| | | (SEQ ID NO: 113) | | |
| TP114ΔrepA:: | oRep1- | CGTTAAAAAAGACCCGGTCACTGGTCAGAACACACTCAGA | pKD3 | Replace |
| cat- | F | GTGTAGGCTGGAGCTGCTTC (SEQ ID NO: 114) | | TP114-083 by |
| OriV_{R6K} | | | | cat-oriV_{R6K} |
| | oRep1- | AAGGGGCTGAAGAGAGTGCCGATTGTATCAGGCAGCTA | | |
| | R | AACTGTCAGACCAAGTTTACTC (SEQ ID NO: 115) | | |
| | oRep2- | GATTGTATCAGGCAGCTAAA (SEQ ID NO: 116) | TP114 | Screen |
| | F | | | TP114ΔrepA:: |
| | | | | cat-oriV_{R6K} |
| | oRep2- | CTGGTCAGAACACACTCAGA (SEQ ID NO: 117) | | |
| | R | | | |
| pNA01 | oNA5- | CTTAATTAATTAATCCAGAGGCATC | pSIM7 | OriV_{pBBR1} for |
| | F | GCCTGCCCCTCCCTTTT | | pNA01 and |
| | | GGTGTCCA (SEQ ID NO: 118) | | pNA02 |
| | oNA5- | TCTAGATTCAGCTGAATTCCCGGGTGCAC | | pNA02 |
| | R | CGAGGCGGCTACAGCCGATAGTCTGGAA | | |
| | | (SEQ ID NO: 119) | | |
| | oNA6- | CAGGCGATGCCTCTGGATTAATTAATTAAG | pREC1 | tetB for pNA01 |
| | F | GCTTGGATTCTCACCAATAA (SEQ ID NO: 120) | | and pNA02 |
| | oNA6- | TTAAAAATGAAGTTTTAAATCAATCTAAAGTAT | | |
| | R | ATATAGCCAGTTTTGGGGAAGG (SEQ ID NO: 121) | | |
| | oNA7- | GTGCACCCGGGAATTCAGCTGAATCTAGATACGTAGTACT | TP114 | OriT_{TP114} for |
| | F | AAGTCCTCAAGGTTCGTAGA (SEQ ID NO: 122) | | pNA01 and |
| | | | | pNA02 |
| | oNA7- | ATATACTTTAGATTGATTTAAAACTTCATTTTTAAT | | |
| | R | TTGTTACATTTCCTCTCTCTCTCT (SEQ ID NO: 123) | | |
| pNA02 | oNA8- | GGCTGTATGCACGGCATTTTTTTGTCCTTCTAAAACAC | TP114 | Nicking site |
| | F | ATAAGCTTTGTACACAAGCCCG | | deletion |
| | | (SEQ ID NO: 124) | | |
| | oNA8- | ACATGCCCGGAACGGGCTTGTGTACAAAGCTTATGT | | |
| | R | GTTTTAGAAGGACAAAAAAATGCC (SEQ ID NO: 125) | | |
| pKN30 and | okn01 | CATGCTGGAGTTCTTCGCCCACCCCAGCTTCAAAAGCGCTCT | pNA01 or | pNA backbone |
| pKN31 | -F | GCCTGCCCCTCCCTTTTG (SEQ ID NO: 126) | pNA02 | |
| | oKN01 | TGCGCCCTGAGTGCTTGCGGCAGCGTGAGGGGATCTT | | |
| | -R | TTGTTACATTTCCTCTCTCTCTC (SEQ ID NO: 127) | | |
| | oKN02 | TATGCCAATGTAGGAGGTAGAGAGAGAGAGGAAATGTAACA | pKD4 | aph-IIIa |
| | -F | AAAGATCCCCTCACGCTGC (SEQ ID NO: 128) | | |
| | oKN02 | CCCCGTCGAGCCGGTTGGACACCAAAAGGGAGGGGCAGGC | | |
| | -R | AGAGCGCTTTTGAAGCTGGG (SEQ ID NO: 129) | | |
| TP114ΔoriT:: | oriT1-F | CAAGCATTGTAACATGCCCGGAACGGGCTTGTGTACAAAG | pKD3 | cat |
| cat-tetB | | GTGTAGGCTGGAGCTGCTTC (SEQ ID NO: 130) | | |
| | oriT1-R | GGTGATTATGTGGGTTGTTTTGTGGGTTGTCAATGG | | |
| | | TGGGAATTAGCCATGGTCCATATG (SEQ ID NO: 131) | | |
| | oriT2-F | GCGCCGTTCGGGGTTGCAAAGGGGCGTCCCCTTTGGCA | oriT1-F + | Add homology |
| | | CAAGCATTGTAACATGCCCGGA (SEQ ID NO: 132) | oriT1-R | for oriT_{TP114} |
| | oriT2-R | TACCTTATTTAAAGCAATTTGCTCGCCGTTTGTGTG | product | |
| | | GGTGATTATGTGGGTTGTTTTGTG (SEQ ID NO: 133) | | |
| | oriT3-F | CCCAACTTAACTGAGAAAGACACC (SEQ ID NO: 134) | TP114 | Screen |
| | | | | OriT_{TP114} |
| | oriT3-R | GCTAGTTCTGTCTTGGTGTTGTTGT (SEQ ID NO: 135) | | Deletion |
| | | | | clones |
| TP11ΔpilV | opilV- | TCACCATCACGGCGACTACAAAGACGATGACGACAAGTAA | pKD3 | Delete the |
| Δshufflon:: | F1 | ATGGGAATTAGCCATGGTCC (SEQ ID NO: 171) | | shufflon |
| cat | | | | |
| | opilV- | TAAAAAATCACTCTGTAGTTGTTCTATCATAAGTGAATCC | | |
| | R1 | GTGTAGGCTGGAGCTGCTTC (SEQ ID NO: 172) | | |
| | opilV- | CAGTACAGGGGCGATACTTTCGTGCCAATCCGGTCGGTGG | | |
| | F2 | CATCACCATCACCATCACGGCGACTACA (SEQ ID NO: 173) | | |
| | opilV- | GGAGGAATATGCTGTCCTGG (SEQ ID NO: 174) | TP114 | Screen |
| | F3 | | | deletion |
| | opilV- | TCTGGTGGCAATAAAGTGAACT (SEQ ID NO: 175) | | |
| | R3 | | | |
| TP114ΔpilS:: | opilS1- | ATGTCTTCTATTAATATTTTAAATATGCGTTCTGTTTTTT | pKD3 | cat |
| cat | F | GTGTAGGCTGGAGCTGCTTC (SEQ ID NO: 136) | | |
| | opilS1- | TCAGGAATCAGTGCTGAAGGTCAGCGTATTGCTGTCAGATA | | |
| | R | TGGGAATTAGCCATGGTCC (SEQ ID NO: 137) | | |
| | opilS2- | TAACGTCCTGCAACACTAAT (SEQ ID NO: 138) | TP114 | Screen pits |
| | F | | | Deletion |
| | | | | clones |
| | opilS2- | GCTTATCCGATGCACATGAA (SEQ ID NO: 139) | | |
| | R | | | |
| TP114Δrci:: | orci1-F | CAAGAATCTCTACCTTCCCCCCTTTTTTGTCTGGAGGGGAT | pKD3 | cat |
| cat | | TGGGAATTAGCCATGGTCC(SEQ ID NO: 176) | | |
| | orci1-R | TAAAAAATCACTCTGTAGTTGTTCTATCATAAGTGAATCC | | |
| | | TGTGTAGGCTGGAGCTGCTT(SEQ ID NO: 177) | | |
| | orci2-R | GTGATATTGCATTTCGAAGCAAG(SEQ ID NO: 178) | TP114 | Screen rci |
| | | | | Deletion |
| | | | | clones |
| | orci2-R | CCAGGACAGCATATTCCTCC(SEQ ID NO: 179) | | |
| TP114ΔpilV: | opilV1- | CTCACTCGTACCGGGAATATTATTCTGAGGATTAAGAGCA | pKD3 | cat |
| cat | F | ATGGGAATTAGCCATGGTCC(SEQ ID NO: 180) | | |
| | opilV1- | TAAAAAATCACTCTGTAGTTGTTCTATCATAAGTGAATCC | | |
| | R | GTGTAGGCTGGAGCTGCTTC (SEQ ID NO: 181) | | |
| | opilV2- | CCGTTCCTTTGTGGCGGAAT(SEQ ID NO: 182) | TP114 | Screen pilV |
| | F | | | Deletion |
| | | | | clones |
| | opilV2- | CCAGGACAGCATATTCCTCC(SEQ ID NO: 183) | | |
| | R | | | |
| TP114Δshuffl | opilV3- | CAGTACAGGGGCGATACTTTCGTGCCAATCCGGTCGGTGG | TP114 | pilV1 |
| on::pilV1- | F | TCTGGTGGCAATAAAGTGAA(SEQ ID NO: 184) | | |
| cat | | | | |
| | opilV3- | GGACCATGGCTAATTCCCAT | | |
| | R | TTAACCGAAGGGGCAACAAT(SEQ ID NO: 185) | | |
| | opilV4- | ATTGTTGCCCCTTCGGTTAA | pKD3 | cat |
| | F | ATGGGAATTAGCCATGGTCC(SEQ ID NO: 186) | | |
| | opilV1- | TAAAAAATCACTCTGTAGTTGTTCTATCATAAGTGAATCC | | |
| | R | GTGTAGGCTGGAGCTGCTTC (SEQ ID NO: 187) | | |
| TP114Δshuffl | opilV5- | CAGTACAGGGGCGATACTTTCGTGCCAATCCGGTATCTGG | TP114 | pilV2 |
| on::pilV2-cat | F | ACAACGGCAAAAGTGAACTT(SEQ ID NO: 188) | | |
| | opilV5- | GGACCATGGCTAATTCCCAT | | |
| | R | TTAAATCCCAGCACCAGGAA(SEQ ID NO: 189) | | |
| | opilV6- | TTCCTGGTGCTGGGATTTAAATGGGAATTAGCCATGGTCC | pKD3 | cat |
| | F | (SEQ ID NO: 190) | | |
| | opilV1- | TAAAAAATCACTCTGTAGTTGTTCTATCATAAGTGAATCC | | |
| | R | GTGTAGGCTGGAGCTGCTTC (SEQ ID NO: 191) | | |
| TP114Δshuffl | opilV7- | CAGTACAGGGGCGATACTTTCGTGCCAATCCGGTACGTGG | TP114 | pilV3 |
| on::pilV3-cat | F | AAAAAAATTGGCGCAGGTGA(SEQ ID NO: 192) | | |
| | opilV7- | GGACCATGGCTAATTCCCA | | |
| | R | TTCACTGGCAAATGGCGTAAA(SEQ ID NO: 193) | | |
| | opilV8- | TTTACGCCATTTGCCAGTGA | pKD3 | cat |
| | F | ATGGGAATTAGCCATGGTCC(SEQ ID NO: 194) | | |
| | opilV1- | TAAAAAATCACTCTGTAGTTGTTCTATCATAAGTGAATCC | | |
| | R | GTGTAGGCTGGAGCTGCTTC (SEQ ID NO: 195) | | |
| TP114Δshuffl | opilV9- | CAGTACAGGGGCGATACTTTCGTGCCAATCCGGTACGTGG | TP114 | pilV3′ |
| on::pilV3′- | F | AGAAGGGCATCAGGTAGCAC(SEQ ID NO: 196) | | |
| cat | | | | |
| | opilV9- | GGACCATGGCTAATTCCCAT | | |
| | R | TCACTGGCAAACCACGATGT(SEQ ID NO: 197) | | |
| | opilV10 | ACATCGTGGTTTGCCAGTGA | pKD3 | cat |
| | -F | ATGGGAATTAGCCATGGTCC(SEQ ID NO: 198) | | |
| | opilV1- | TAAAAAATCACTCTGTAGTTGTTCTATCATAAGTGAATCC | | |
| | R | GTGTAGGCTGGAGCTGCTTC (SEQ ID NO: 199) | | |
| TP114Δshuffl | opilV11 | CAGTACAGGGGCGATACTTTCGTGCCAATCCGGTGTGTGG | TP114 | pilV4 |
| on::pilV4- | -F | AGGGCATTAGGTGGAAAGCT(SEQ ID NO: 200) | | |
| cat | | | | |
| | opilV11 | GGACCATGGCTAATTCCCAT | | |
| | -R | TTAATTGAGAGTTACACAGG(SEQ ID NO: 201) | | |
| | opilV12 | CCTGTGTAACTCTCAATTAA | pKD3 | cat |
| | -F | ATGGGAATTAGCCATGGTCC(SEQ ID NO: 202) | | |
| | opilVI- | TAAAAAATCACTCTGTAGTTGTTCTATCATAAGTGAATCC | | |
| | R | GTGTAGGCTGGAGCTGCTTC (SEQ ID NO: 203) | | |
| TP114Δshuffl | opilV13 | CAGTACAGGGGCGATACTTTCGTGCCAATCCGGTGTGTGG | TP114 | pilV4′ |
| on::pilV4′- | -F | AGAACTTCCGGTTCCTCTAA(SEQ ID NO: 204) | | |
| cat | | | | |
| | opilV13 | GGACCATGGCTAATTCCCATTTAAGT | | |
| | -R | TTGGTATCCAAAAA(SEQ ID NO: 205) | | |
| | opilV14 | TTTTTGGATACCAAACTTAAATGGGA | pKD3 | cat |
| | -F | ATTAGCCATGGTCC(SEQ ID NO: 206) | | |
| | opilV1- | TAAAAAATCACTCTGTAGTTGTTCTATCATAAGTGAATCC | | |
| | R | GTGTAGGCTGGAGCTGCTTC (SEQ ID NO: 207) | | |
| TP114Δshuffl | opilV15 | CAGTACAGGGGCGATACTTTCGTGCCAATCCGGTACGTGG | TP114 | pilV5 |
| on::pilV5- | -F | CAGAAAAATGGCGGCGGTAC(SEQ ID NO: 208) | | |
| cat | | | | |
| | opilV15 | GGACCATGGCTAATTCCCAT | | |
| | -R | TCACTGACACAATGCATAAG(SEQ ID NO: 209) | | |
| | opilV16 | CTTATGCATTGTGTCAGTGA | pKD3 | cat |
| | -F | ATGGGAATTAGCCATGGTCC(SEQ ID NO: 210) | | |
| | opilVI- | TAAAAAATCACTCTGTAGTTGTTCTATCATAAGTGAATCC | | |
| | R | GTGTAGGCTGGAGCTGCTTC (SEQ ID NO: 211) | | |
| TP114Δshuffl | opilV17 | CAGTACAGGGGCGATACTTTCGTGCCAATCCGGTTCGTGG | TP114 | pilV5′ |
| on::pilV5′- | -F | AAATCAATAGGTTCATGTGC(SEQ ID NO: 212) | | |
| cat | | | | |
| | opilV17 | GGACCATGGCTAATTCCCATT | | |
| | -R | TAGCGGAAGCAGTGAACAG(SEQ ID NO: 213) | | |
| | opilV18 | CTGTTCACTGCTTCCGCTAA | pKD3 | cat |
| | -F | ATGGGAATTAGCCATGGTCC(SEQ ID NO: 214) | | |
| | opilV1- | TAAAAAATCACTCTGTAGTTGTTCTATCATAAGTGAATCC | | |
| | R | GTGTAGGCTGGAGCTGCTTC (SEQ ID NO: 215) | | |
| pPilS | opPilS- | CTGTCAGACCAAGTTTACTC(SEQ ID NO: 216) | pBAD30 | oriV_{p15A}, araC |
| | F1 | | | P_{BAD} |
| | opPIIS- | TTTTGCCTCCTA | | |
| | R1 | CGCTAGCCCAAAAAAACGGG(SEQ ID NO: 217) | | |
| | opPilS- | AACCGTATTACCGCCTTTGAG (SEQ ID NO: 218) | pSB1C3 | cat |
| | F2 | | | |
| | opPilS- | TCAATCTAAAGTATATATGAGTAAACTTGGTCTGACAG | | |
| | R2 | GTAAACTTGGTCTGACAGCTCG(SEQ ID NO: 219) | | |
| | opPilS- | TCTCCATACCCGTTTTTTTGGGCTAGCGTAGGAGGCAAAA | TP114 | pilS |
| | F3 | ATGTCTTCTATTAATATTTT(SEQ ID NO: 220) | | |
| | opPilS- | GGCGAGCGGTATCAGCTCACTCAAAGGCGGTAATACGGTT | | |
| | R3 | TCAGGAATCAGTGCTGAAGG(SEQ ID NO: 221) | | |
| pilV4′ | opPilV | TCTCCATACCCGTTTTTTTGGGCTAGCGTAGGAGGCAAAA | TP114 | pilV4′ |
| | 4′-F | ATGAAAAAGACAGATAAAGG(SEQ ID NO: 222) | | |
| | opPilV | GGCGAGCGGTATCAGCTCACTCAAAGGCGGTAATACGGTTT | | |
| | 4′-R | TAAGTTTGGTATCCAAAAA (SEQ ID NO: 223) | | |

^{a}Oligonucleotide's priming site are underlined.
^{b}Mutation introduced in the oligonucleotides are in bold.

[0150] DNA Purification.

[0151] Purification of DNA was performed between each step of plasmid assembly to avoid buffer incompatibility or stop enzymatic reactions. PCR reactions were generally purified by Solid Phase Reversible Immobilization (SPRI) using Agencourt Ampure XP DNA binding beads (Beckman Coulter) according to the manufacturer's guidelines. When DNA samples were digested with restriction enzymes, DNA was purified using DNA Clean and Concentrator (ZYMO RESEARCH) following manufacturer's recommendation for cell suspension DNA purification protocol. After purification, DNA concentration and purity was routinely assessed using a Nanodrop spectrophotometer when necessary.

[0152] DNA transformation into E. coli by electroporation. Routine plasmid transformations were performed by electroporation. Electrocompetent E. coli strains were prepared from 20 mL of LB broth. Cultures reaching exponential growth phase of 0.6 optical density at 600 nanometers (OD₆₀₀ₙₘ) were then washed three times in sterile distilled water. Cells were then resuspended in 200 μL of water and distributed in 40 μL aliquots. The DNA was then added to the electrocompetent cells and the mixture was transferred in a 1 mm electroporation cuvette. Cells were electroporated using a pulse of 1.8 kV, 25 μF and 200Ω for 5 ms. Cells were then resuspended in 1 mL of non-selective LB medium and recovered for 1 hour before plating on selective media.

[0153] DNA transformation into E. coli by heat-shock. Heat-shock transformation was mostly used to clone Gibson assembly products. Chemically competent cells were prepared according to the rubidium chloride protocol as described previously (Green et al., 2013). Chemically competent cells were flash-frozen and conserved at −80° C. before use. Gibson assembly products were directly transformed into EC100Dpir+ chemically competent cells at a 1/10 volume ratio. Routinely, up to 10 μL of DNA was added to 100 μL competent cells before transformation by a 45 seconds heat shock at 42° C. Cells were then resuspended in 1 mL of non-selective LB medium and let to recover for 1 hour at 37° C. before plating on selective media.

[0154] Introduction of selection markers in Escherichia coli Nissle 1917 (EcN) strains for conjugation quantification. The modified EcN strains were obtained by Tn7 insertion of the antibiotic resistance cassettes as described previously (McKenzie et al., 2006). Integration was verified by PCR using corresponding primers as described in table 2. Loss of ampicillin resistance was confirmed to verify plasmid elimination. More specifically, the pGRG36 vector was purified from E. coli EC100Dpir+ and digested with SmaI+XhoI. The inserts were amplified by PCR using their corresponding primers (Table 2) and inserted by Gibson assembly between attL_{Tn7} and attR_{Tn7} sites of the digested pGRG36 plasmid (FIG. 1). The Gibson assembly products were then transformed in chemically competent E. coli EC100Dpir+ strain. The resulting plasmids were analyzed using restriction enzymes, and positive clones were transformed into E. coli MFDpir+ (Ferrières et al., 2010). Plasmids were mobilized from E. coli MFDpir+ to EcN by conjugation. To mediate cassette insertion into the terminator of glmS, EcN was first cultivated at 30° C. in LB with arabinose until 0.6 OD₆₀₀ₙₘ. Cells were next heat-shocked at 42° C. for 1 hour and incubated at 37° C. overnight to allow for plasmid clearance. An aliquot of the bacterial culture was then streaked onto a LB agar plate. 20 colonies were analyzed, and colonies that only grew in the absence of ampicillin, but contained the insert's selection markers were then investigated by PCR using the appropriate primers listed in table 2.

[0155] Construction of E. coli KN01ΔdapA. A DAP auxotrophic variant was also obtained through the deletion of the dapA gene in EcN (Born et al., 1999) by recombineering using pSIM6. DAP auxotrophy was shown to be a good marker to discriminate donor and recipient strains for conjugation without hindering transfer frequencies as DAP auxotroph reversion was never reported (Ronchel et al, 2001) and, when complemented, DAP auxotrophy has little impact on the fitness of the bacterium (Allard et al., 2015). To generate a DAP auxotrophic strain, the aph-IIIa resistance cassette of pKD4 was amplified by PCR with added homology for the regions flanking dapA. A second PCR round on the purified PCR product then allowed to increase the length of homology. Recombineering was performed in EcN using pSIM6 as described previously (Datta et al., 2006). Briefly, EcN containing pSIM6 was electroporated with the purified PCR product. Kanamycin resistant bacteria were selected and DAP auxotrophy confirmed. Insertion of the cassette and deletion of dapA were also verified by PCR with corresponding primers (Table 2). After the confirmation of the cassette insertion in the dapA gene locus, the strain was cured from pSIM6 by heatshock at 42° C. for 1 hour followed by overnight incubation at 37° C. The culture was then streaked on selective plates to identify Ap sensitive clones, which were next transformed with pCP20 to eliminate the resistance cassette as described previously (Datsenko et al., 2000). pCP20 plasmid was cured by heat-shock following the same procedure as before. Next, the SmSp insert was added in the genome of EcNΔdapA strain to complete KN01ΔdapA.

[0156] In vitro conjugation assay. For all in vitro conjugation assays, donor strains were KN01ΔdapA and recipient strains were KN02 unless specified otherwise. The strains were grown from frozen stocks 18 hours prior to conjugation experiments, mixed at a 1:1 volume ratio (100 μL each), centrifuged at maximum speed for one minute and washed in 200 μL of LB without antibiotics. The bacteria mix was then spun down and, either resuspended in 5 μL of LB broth and deposited on a LB agar plate with DAP, or resuspended to 1.0 OD₆₀₀ₙₘ in LB broth with DAP. The cell mix was then incubated at 37° C. for the desired conjugation time before being resuspended in 800 μL sterile PBS and diluted 1/10 serially in sterile PBS to avoid growth during dilution and plating. 5 μL of each dilution were then spotted in duplicates on LB plates with appropriate antibiotics to select donors, recipients and transconjugants, and the number of Colony Forming Units (CFU) was counted. All conjugation frequencies were calculated by dividing the number of transconjugants by the total number of recipient CFUs. The conjugation frequencies per donor were however equivalent (data not shown) since cells were always mixed 1:1. All conjugation experiments were repeated with at least three independent biological replicates.

[0157] Mouse model. All mice-related protocols were designed in compliance with our institution Animal Care Comity Guidelines and were strictly evaluated to avoid animal suffering. Animals were provided with water and regular chow ad libitum throughout all experiments. Animals were housed in individually ventilated cages and no more than 5 individuals shared the same cage. All animals used were C57 BL/6 females of 16-20 g (Charles River) and were given a 3 days adaptation period upon arrival. Animal weight and health was monitored daily throughout each experiment. No significant health or weight loss was noted for any mouse in any experiment. For Sm treated mice groups, Sm working concentration was first evaluated to maximize Enterobacteriaceae clearance and EcN colonization (Kotula et al., 2014). A concentration of 1 g/L of Sm was chosen and added to drinking water 2 days prior to gavages for all Sm-treated mice groups. From that point, water bottles were refreshed every 3 days to maintain optimal Sm activity. Bacterial load was monitored in feces sampling at specified time points. At the end of the experiment, animals were anesthetized with isoflurane and sacrificed by cervical dislocation. Animals were then dissected to reveal the colonization pattern and gut bacterial content was evaluated by CFU.

[0158] Mice inoculum preparation. Two days prior to gavages, the appropriate strains were streaked from frozen stocks onto MacConkey selective plates and incubated overnight at 37° C. The next day, colonies were inoculated in selective LB broth at 37° C. Three to four hours prior to mice oral challenge, the strains were subcultured again with a large inoculum (200 μL or 500 μL) in 20 mL selective LB broth and incubated at 37° C. until 0.6±0.1 OD₆₀₀ₙₘ was reached. The cells were then washed once in PBS and concentrated in a volume equivalent to 6.0 OD₆₀₀ₙₘ. An aliquot of the inoculum was used to evaluate cell concentration. 100 μL of the final cell suspension were administered orally to each mouse (approximately 1×10⁸ CFU).

[0159] Feces and tissues processing. Collection tubes were prepared prior to the experiment by adding 500 μL of PBS and a single 0.2 mm glass bead to a sterile 1.5 mL microtube. Then, tubes were weighted before and after sampling to normalize CFU by sample weight. Samples were homogenized in a FastPrep-24 (MP) bead beater for 1 minute at maximum speed. Then, the homogenates were centrifuged at 500×g for 30 second to avoid possible pipetting of larger debris. Centrifugation has shown no significant impact on retrieved CFU (data not shown). The samples were then serially diluted 1/10 in sterile PBS from 10⁰ to 10⁻⁷ of the initial concentration and 2.5 μL of each dilution was spotted on selective MacConkey plates in technical duplicates. CFUs/mg sample were calculated as a function of the sample measured weight. For each experiment, total Enterobacteriaceae clearance was also followed on MacConkey plates without antibiotics as a control for Sm treatment (data not shown).

[0160] Mice dissection and EcN colonization pattern assessment. The mice were sacrificed on day 4 and dissected to extract the duodenum, jejunum, ileum, caecum, ascending colon and descending colon. To distinguish the parts of the intestine, the first 3 centimeters (cm) of small intestine attached to the stomach were considered to be the duodenum, the 6 central cm the jejunum, and the last 6 cm (closest to the caecum) the ileum. The ascending and descending colons were the exact halves of the colon. Two spaced quarters of each section were sampled for CFUs analysis. The longitudinal half of the caecum was used for CFU as well. Since the caecum is a large and distinct structure of the mouse intestine, and since EcN colonizes strongly the caecum, this region was chosen as a representative part of the intestine to study colonization and conjugative bacterial cell treatments.

[0161] In vivo conjugation mouse model. For in vivo conjugation experiment, mice were orally challenged with the recipient strain 2 or 12 hours prior to the introduction of donor strain. This, in order to avoid possible plasmid transfer in the PBS solution prior to gavage. Conjugation was then monitored by feces sampling at specified time points. Mice were sacrificed at the end of the experiment and caecum was extracted to verify conjugation levels in the murine gut. Feces were homogenized and CFU were acquired on MacConkey plates as described in the Feces and tissue processing section.

[0162] Statistical analysis. Statistical significance was performed on the logarithmic value of the data using One-way ANOVA unless specified otherwise. P-values are directly indicated on the graphs and represent statistical significance of the difference between the two data groups. Differences in the data were considered significant when the P-value was bellow 0.05.

[0163] 1.1 Escherichia coli Nissle 1917 Modified Strain Construction

[0164] Generation of antibiotic-resistant EcN variants. Since EcN had no natural antibiotic resistance phenotype (Sonnenborn et al., 2009), efficiency of conjugation between two strains of EcN was impossible to quantify. The use of two different resistance markers was essential to distinguish between the donor and recipient strains. Furthermore, the presence of an antibiotic resistance marker on a conjugative plasmid allowed for the distinction between recipients and transconjugants. Several strains of EcN were therefore developed to allow quantification of conjugation efficiency. One way to generate an antibiotic resistant variant of a strain was to insert a resistance gene in its chromosome. Integration of DNA in the chromosome of a bacterium was efficiently achieved using a Tn7-based system (McKenzie, 2006). This system used a plasmid, pGRG36, as a vector for the expression of the Tn7 machinery, but also as a backbone for the insertion of a DNA sequence of interest. The DNA sequence of interest required cloning between the attL_{Tn7} and attR_{Tn7} sites of pGRG36 so that it could be inserted in the terminator sequence of glmS. The Tn7 strategy was used to insert antibiotic resistance cassettes into EcN and created three different strains (FIG. 1). Those strains were all resistant to Sm which was used to hinder the microbiota in vivo. Additional resistance phenotypes were unique for each three strains. For instance, the donor KN01 was also resistant to Sp, the recipients KN02 was also resistant to Cm, and KN03 was also resistant to Tc.

[0165] Auxotrophy as a selection marker for conjugation. As opposed to antibiotic resistance which allows a cell to grow in the presence of an antibiotic, auxotrophy prevents a cell from growing under normal conditions. This can be particularly useful to further distinguish donor and recipient strains in a conjugation experiment as no known reversion mechanisms were yet reported and auxotrophic donor strains present no defect in their ability to conjugate. EcN was first transformed with pSIM6, a plasmid that expressed the lambda red recombination system. Then, the dapA gene was replaced with an antibiotic resistance cassette as previously described (Datsenko et al., 2000). The deletion of dapA interrupted the lysine biosynthesis pathway as well as the peptidoglycan wall synthesis (FIG. 2). The cell therefore became unable to synthesize its cell wall and the lysine amino acid. Both functions are essential for cell survival under normal conditions. However, the mutation could be complemented by an exogenous source of DAP (Allard et al., 2015). Plasmid pGRG36-SmSp was then used to insert SmSp resistance gene in EcNΔdapA's chromosome thereby creating KN01ΔdapA. This donor strain was not able to grow without DAP and allowed for a better distinction of transconjugants and recipients. Also, as a control, it was verified that the deletion of dapA did not affect the conjugation efficiency, which it did not (data not shown).

[0166] EcN colonized the murine gut. In order to compare conjugation efficiencies of several conjugative plasmids in vitro and in vivo, the ability of EcN to colonize the murine gut was verified. Sm was previously shown to increase colonization stability of E. coli in mice, and since KN01 had the lowest Minimal Inhibitory Concentration (MIC) for Sm (Table 3), it was used in colonization assays to determine the concentration of Sm needed to (1) clear the Enterobacteriaceae from the microbiome and (2) facilitate colonization of the donor and recipient strains. Concentrations of 1,000 mg/L (FIG. 3.A), 400 mg/L (FIG. 3.B), 250 mg/L (FIG. 3.C), 100 mg/L (FIG. 3.D), 50 mg/L (FIG. 3.E) and 0 g/L (FIG. 3.F) of Sm were tested. 1 g/L of Sm in drinking water cleared Enterobactericeae while allowing stable colonization of the KN01 strain. This concentration was used in subsequent experiments. Colonization pattern of EcN was also addressed both in Sm treated and untreated mice by analyzing KN01's CFU density in the duodenum, jejunum, ileum, caecum, ascending colon and descending colon (FIG. 3.G). Colonization was higher in all part on the intestine of Sm treated mice and was particularly high (>10³ CFU/mg tissue) for parts of the intestine between the ileum and the anus. EcN was therefore a good strain for the quantification of conjugation in vivo because of its ability to colonize different regions of the intestinal tract. However, the caecum was used for subsequent conjugation quantification, as it is a distinct structure that yielded higher density of KN01 (10⁴ CFU/mg tissue).

TABLE 3
Minimal inhibitory concentration (MIC) of EcN strains.

| Strain | Sm | | Sp | | Ap | Cm | |
|---|---|---|---|---|---|---|---|
| EcN | 25 | mg/L | 50 | mg/L | <25 mg/L | <8 | mg/L |
| KN01 | 800 | mg/L | 3 | g/L | <25 mg/L | <8 | mg/L |
| KN02 | >1.6 | g/L | 50 | mg/L | <25 mg/L | 264 | mg/L |

[0167] 1.2—Comparison of Conjugative Transfer Efficiency In Vitro Versus In Vivo

[0168] Selection of bacterial conjugative plasmids. To find the most efficient bacterial conjugative system for the transfer of DNA in vivo, six conjugative plasmids were chosen. Those six plasmids span six different incompatibility families (Table 4). Incompatibility families are a classification based on the ability of two plasmids to co-exist at the same time in a cell. For two plasmids to belong to the same incompatibility family, they have to be unable to be maintained simultaneously in a cell. There are two major ways plasmids can be incompatible (1) by inhibiting the transfer of the other plasmid inside the hosting cell and (2) by strong similarity between their maintenance modules. By selecting plasmids from different incompatibility families, plasmids had a higher chance of being more phylogenetically distant from one another. The plasmids were also selected for their reported in vitro transfer efficiencies (Bradley et al., 1980).

TABLE 4
Conjugative plasmid selected for this example.

| | | Size | | | Accession | |
|---|---|---|---|---|---|---|
| Name | Incompatibility | (bp) | CDS | Resistances* | number | Supplier/Source |
| pOX38 | IncF1 | 59,705 | 62 | Sp^{R}, Tc^{R}, Su^{R} | MF370216.1** | Laura Frost's |
| | | | | | | research group |
| R6K | IncX2 | 39,872 | 52 | Ap^{R}, Sm^{R} | None*** | DSM-4245 |
| | | | | | | (DSMZ) |
| TP114 | Incl2 | 64,818 | 92 | Km^{R} | MF521836.1 | DSM-4246 |
| | | | | | | (DSMZ) |
| pVCR94ΔX3 | IncC | 121,195 | 152 | Km^{R} | KF551948.1** | Carraro et al. |
| | | | | | | 2017 |
| R388 | IncW | 33,913 | 48 | Su^{R}, Tm^{R} | NC_028464 | DSM-5189 |
| | | | | | | (DSMZ) |
| RP4 | IncP1α | 60096 | 70 | Ap^{R}, Tc^{R} | BN000925.1 | DSM-3876 |
| | | | | | | (DSMZ) |

*As experimentally tested in 96 well plates
**NCBI available sequence are engineered variant resistant to other antibiotics
***Available at http://www.sanger.ac.uk/resources/downloads/plasmids/

[0169] Bacterial conjugation efficiency was affected by the physical properties of the environment. The six conjugative plasmids were transferred into the KN01ΔdapA and KN01 strains, which constituted the donor strains for the following experiments. Conjugation experiments, between KN01ΔdapA containing one of the conjugative plasmids and KN02 as the recipient, were carried both on agar plates (solid mating) and in broth (liquid mating) in an effort to predict the conjugation efficiency of conjugative plasmids in vivo (FIG. 4.A). Conjugation on solid support allows conjugative plasmids to transfer without the need for mating pair stabilization as cells are immobilized on a solid surface and no shearing forces are present (Bradley, 1984). However, conjugation in liquid is a much more instable environment as cells must firmly grip to each other to avoid conjugation interruption by shearing forces as cells are constantly moving in the liquid. Most plasmids transferred efficiently on agar plates, but pOX38 and R6K were able to conjugate at similar frequencies in both agar and broth. Conjugation mediated by TP114 seemed only mildly affected under liquid transfer conditions.

[0170] Discrepancies of conjugation efficiency between in vivo conditions and in vitro laboratory condition. The conjugative plasmids which could be of interest for therapeutic applications (in vivo) and could constitute the most appropriate transfer machinery for the bacterial conjugative bacterial cell system was determined. Conjugation between KN01 and KN02, used as donor and recipient, respectively, was performed in a Sm-treated conjugation mouse model. The mice were fed with the recipient strain 2 hours prior to the introduction of the donor strain. The proportion of transconjugants was monitored for three days in feces (FIG. 4.B). On the third day of the experiment, mice were sacrificed and the proportion of transconjugants was addressed in the caecum. The conjugation results in the caecum were consistent with those found in the feces (FIG. 4.C). Raw CFUs data for donors, recipients, and transconjugants are shown for each plasmid in FIG. 5. Only three plasmids (pOX38, R6K and TP114) had been able to conjugate reproducibly in mice. Among those, TP114 had a transfer rate nearly 100-fold higher in vivo than in vitro (FIG. 4.A). Also, TP114 was able to transfer between ˜240 and >1,400,000-fold more efficiently than all other tested plasmids at any of the tested timepoint. In vivo transfer activity of TP114 was also confirmed in an additional group of 5 mice and was also compared to the one measured in vitro on solid medium using the same time course (FIG. 4.D). Conjugation of TP114 over 48 hours or more yielded very little improvement in transfer rates in vitro compared to in vivo conditions. To verify if conjugation in Sm-treated mice reflects the transfer rates in an undisturbed microbiome, 12-hour conjugation experiments were carried in both Sm-treated or untreated mouse model with TP114 and R6K (FIG. 4.E). Transfer rates were similar in both conditions, hereby showing that the presence of the intestinal microbiome did not affect conjugation by TP114 or R6K. The influence of colonization time between recipient and donor introduction was also investigated with 2 or 12 hours between gavages. This parameter had little influence on the overall conjugation frequencies of TP114 (FIG. 6.A) and R6K (FIG. 6.B). In addition, colonization levels of recipient strains for both TP114 and R6K were similar regardless of the period between gavages (FIGS. 6.C and 6.D). However, TP114 was the only conjugative plasmids tested capable of transferring in vivo with an efficiency rate of nearly 100%, it was therefore considered the most interesting candidate to use as the transfer machinery of the COP.

### EXAMPLE II—IDENTIFICATION OF GENES AND GENETIC ELEMENTS REQUIRED FOR IN VIVO CONJUGATIVE DELIVERY OF DNA BY TP114

[0171] Strains, plasmids and growth conditions. All strains and plasmids are described in Table 1. All plasmid sequences are provided in the sequence appendix. Oligonucleotides used in this example, strain growth conditions, DNA manipulation, plasmid construction, recombineering and routine transformation can be found in the Material and Method section of the Example I.

[0172] Sequencing of TP114. TP114 was acquired from DSMZ (DSM-4246) and transferred from E. coli K12 J53-2 by conjugation into E. coli MG1655Nx^{R}. The resulting strain was grown at 37° C. in selective LB broth to obtain sufficient DNA for sequencing. An Illumina library was prepared using the QIAseq FX Library kit (Qiagen) from size-selected genomic DNA fragments of approximately 400 to 600 bp. The Illumina library was sequenced on a MiSeq instrument using paired-end reads of 300 bp to assemble longer composite reads covering the entire insert (Rodrigue et al., 2010). A MinION (Oxford Nanopore Technologies, UK) sequencing library was also prepared using 1.5 μg of high-molecular weight genomic DNA and the R9 Nanopore sequencing kit (SQK-NSK007, Oxford Nanopore Technologies, UK). Illumina sequencing reads were assembled with the Roche gsAssembler version 2.6 either de novo or using reference sequences from other conjugative plasmids from the IncI2 family (R721, AP002527.1; pChi7122, FR851304; pRM12761, CP007134.1; pSLy21, NZ_CP016405.1). Large de novo and reference contigs were then manually assembled and scaffolded with high-quality MinION reads using BLASTn. Finally, 10 regions of 1.5 kb selected based on lower read coverage were re-sequenced by Sanger sequencing to confirm the assembly with corresponding primers (Table 2). The resulting circular sequence of 64,818 bp (43% G+C content) was submitted to the RAST annotation server (Aziz et al., 2008), and a total of 92 open reading frames (ORF) were predicted. The annotation was then adjusted to name homologous genes consistently between TP114 and the reference IncI2 plasmid R721 (GenBank: AP002527.1).

[0173] Analysis of TP114 gene function. In silico analysis of TP114 gene function was performed using both CDsearch (Marchler-Bauer et al., 2017) and BLASTp (Altschul et al., 1990). A protein multi-fasta file was first generated for all 92 Open Reading Frames (ORF) predicted by RAST (Aziz et al., 2008). The multi-fasta file was processed by CDsearch to find conserved protein domains and attribute protein families, or superfamilies, to each protein coding genes of TP114. The multi-fasta file was also submitted to BLAST to identify putative protein homologues when CDsearch would fail to identify any protein domain with high confidence (e-value <1×10⁻¹⁵). Both analyses were performed using default parameters. BLAST hits with high identity levels were used to attribute putative functions only when more than five hits showed the same result. Proteins that failed at matching these criteria were considered of unknown function.

[0174] Comparative genomics. Gene content comparison was performed on TP114 against a database of 7 randomly selected plasmids of the IncI1 and IncI2 subfamilies based only on sequence availability (Table 5). The BRIG stand-alone software (Alikhan et al., 2011) was used to perform BLAST based homology analysis between TP114 and each plasmid group. Homology was analysed using both nucleotide sequence of the whole plasmids and amino-acid sequence of the coding genes. Conservation of genes was evaluated using the sequence identity cut-offs of 100%, 70%, and 50%. The identity percentage was calculated by attributing scores of −2 for mismatches, +1 for matches and a linear cost for insertion/deletion. Genes were then categorized as core genes when present in 100% of the plasmids, soft core genes when present in above 50% of the plasmids, or accessory genes when present in less than 50% of the plasmids.

[0175] Deletion of pilS in TP114. An FRT flanked cat gene was amplified from pKD3 was used to delete pilS in TP114 by recombineering (Datsenko et al., 2000). The recombinant clones of MG1655Rf^{R} were then screened using appropriate primers (Table 2). The pilS deletion generated TP114ΔpilS::cat, which was then transferred to E. coli strain KN01. The ability of wild type and its pilS mutant to transfer from E. coli KN01 to E. coli KN03 was assayed under solid, liquid (static), liquid with agitation and in vivo conditions.

[0176] Deletion of the pilV adhesin, the pilVC-terminus shufflon and locking of C-terminus variants of pilV. A cassette containing the cat chloramphenicol resistance gene flanked by FRT sequences was amplified from pKD3 using appropriate primers (Table 2) providing homology to the regions adjacent to the shufflase gene rci. The cassette was then inserted in TP114 by recombineering using pSIM6 in MG1655Rf^{R} to generate TP114Δrci::cat. pSIM6 was then cured by incubation of the strain at a non-permissive temperature, and next transformed with pE-FLP. This resulted in the excision of the cat gene from TP114Arci::cat, creating TP114Arci, a variant of TP114 lacking the recombination capabilities provided by rci. Then, a cassette containing a FRT flanked cat gene with homology to regions adjacent to pilV N-terminus as well as the previous rcideletion was amplified and used for a second round of recombieering again using pSIM6 in a MG1655Rf^{R} strain. The resulting strain TP114ΔpilV-rci::cat was then treated with pE-FLP, generating TP114ΔpilV-rci. Alternatively, a cassette containing a FLAG-tag and an FRT flanked cat gene was amplified from pKD3 (with the FLAG-tag being provided by the PCR primer). The cassette was inserted in TP114 to replace the 3′ end of pilV, the shufflon and the deleted shufflase gene region by recombineering (Datsenko et al., 2000). Recombinant clones of E. coli MG1655Rf^{R} were then screened using appropriate primers (Table 2). The deletion generated TP114pilVΔshufflon-rci::catin which the shufflon is replaced by a FLAG-tag. EachC-terminal variants of pilV were also amplified by PCR and fused to an FRT flanked chloramphenicol resistance cassette. The complete cassette contained homology regions for the pilV gene and the shufflase deletion scar. Recombineering using these cassettes generated “locked” configurations for each pilV variants (TP114pilVΔshufflon::pilV1-cat, TP114pilVΔshufflon::pilV2-cat, TP114pilVΔshufflon::pilV3-cat, TP114pilVΔshufflon::pilV3′-cat, TP114pilVΔshufflon::pilV4-cat, TP114pilVΔshufflon::pilV4′-cat, TP114pilVΔshufflon::pilV5-cat, TP114pilVΔshufflon::pilV5′-cat). Mutant versions of TP114, including TP114ΔpilV-rci, TP114ΔpilVΔshufflon-rci::cat, and the variants of the pilV adhesins (TP114pilVΔshufflon::pilV1-cat, TP114pilVΔshufflon::pilV2-cat, TP114pilVΔshufflon::pilV3-cat, TP114pilVΔshufflon::pilV3′-cat, TP114pilVΔshufflon::pilV4-cat, TP114pilVΔshufflon::pilV4′-cat, TP114pilVΔshufflon::pilV5-cat, TP114pilVΔshufflon::pilV5′-cat) were transferred to E. coli strain KN01. The ability of the wildtype TP114 and its pilV mutant versions of TP114 to transfer from E. coli KN01 to E. coli KN03 was assayed under solid, liquid (static) and liquid with agitation conditions.

[0177] Construction and use of pPilS and pPilV4′. Plasmid pPilS was constructed by amplifying the pilS gene from TP114, oriV_{p15A}-araC-P_{BAD} from pBAD30 and cat from pSB1C3 using primers listed in Table 2 and joining them by Gibson assembly. Plasmid pPilS was then transformed into KN01+TP114ΔpilS for complementation studies. In a similar way, plasmid pPilV4′ was constructed by amplifying the pilV4′ gene from TP114, oriV_{p15A}-araC-P_{BAD} from pBAD30 and cat from pSB1C3 using primers listed in Table 2 and joining them by Gibson assembly. Plasmid pPilV4′ was then transformed into KN01+TP114ΔpilV for complementation studies. The pilS and pilV4′ genes are under the regulation of AraC⁴⁰, providing arabinose inducible expression. For complementation experiments, donor and recipient strains were grown overnight at 37° C. Two hours before conjugation, arabinose was added to the donor strain cultures at a final concentration of 1% w/v. Then, OD₆₀₀ₙₘ of each culture was measured and cells were washed in LB+1% arabinose then resuspended in a volume equivalent to 40 OD₆₀₀ₙₘ in LB+1% arabinose. A volume of 2.5 μL of the donor and recipient strains were then mixed together and deposited on an LB+1% arabinose plate for solid conjugation or mixed with 195 μL of pre-warmed LB+1% arabinose for conjugation under both liquid static and liquid shaking conditions. Matings were then performed at 37° C. for 2 hours. Additionally, conjugations under the liquid shaking condition were placed on a rotary agitator. After incubation, the matings were serially diluted 1/10 and plated on selective media for CFU analysis of the donor, recipient, and transconjugant strains.

[0178] In vitro conjugation assay. All in vitro conjugation experiments were performed as described in the Material and Method section of Example I. Of note, for liquid mating with agitation, cell mixes were incubated at 37° C. for 2 hours on a rotary mixer instead of the standard static incubation.

[0179] High-density transposon mutagenesis (HDTM). A conjugation assisted random transposon mutagenesis experiment was performed. The transposition system was composed of pFG036 (a plasmid coding for a cl transcription repressor), pFG051 (a pir-dependent suicide plasmid coding for the Tn5 transposon machinery under the repression of cl, a RP4-based origin of transfer and a Sp^{R} transposon) and MFDpir+ (Ferrières et al., 2010) (which has an RP4 conjugative machinery, diaminopimelic acid auxotrophy and the Pi protein necessary for pFG051's maintenance in the cell). The HDTM experiment was performed in several successive steps in order to clearly identify the function of genes involved at each one of these steps. First, pFG051 was transferred by conjugation from MFDpir+ to EcN containing TP114 for 2 hours at 30° C. on LB+DAP plates in triplicates. Once in EcN, Tn5 machinery was expressed from pFG051 to mediate random transposon insertions in TP114. Then, transconjugants were entirely plated onto 6 plates per replicates and incubated overnight at 37° C. After the incubation, transconjugant clones formed a cell lawn that was collected using a cell scrapper and subsequently resuspended in LB broth with selective antibiotics. Transconjugants, which forms the mutant library, were then washed, resuspended in 4.5 mL of LB+25% glycerol and frozen for storage. Also, 100 μL of the mutant library was used in two subsequent conjugative transfer experiments towards KN02 and then towards KN03, which were both carried in parallel in vitro and in vivo.

[0180] Mouse model for in vivo HDTM library conjugation. Mice related experiments were done as described in the Material and Method section of Example I with only minor modifications. The donor strain inoculum was prepared 3 to 4 hours prior to mice oral gavage. 500 μL of a frozen stock of the High-Density Transposon Mutagenesis (HDTM) mutant library was inoculated in 20 mL selective LB broth and incubated at 37° C. for 4 hours before gavage. When ready, cells were washed once in PBS and concentrated in a volume equivalent to 6.0 OD₆₀₀ₙₘ. Mice were orally challenged with the recipient strain 3 hours prior to the introduction of the donor strain. Conjugation was then monitored by feces sampling at 24 and 48 hours. At 48 hours, mice were sacrificed and the caecum was extracted. Also, for transconjugants, 4×100 μL per mice were also plated in order to obtain a large number of transconjugant clones for the sequencing.

[0181] HDTM libraries sequencing. For each sample, a 1.5 mL frozen stock aliquot of mutant library was thawed on ice for 15 minutes. The aliquot was centrifugated and cells were resuspended in 300 μL of Cell lysis buffer from the Quick gDNA Miniprep kit (ZymoResearch). DNA was fragmented using a Bioruptor Plus (Diagenode) for 12 cycles of 30 seconds ON, 30 seconds OFF at 4° C. After fragmentation, the Quick gDNA Miniprep kit's protocol for cell suspension was followed and DNA was eluted in 50 μL of molecular grade water. 10 μg of DNA was then end-repaired using End-repair Mix HC (Enzymatics) followed by DNA purification using AMPure DNA XP magnetic beads (Agencourt). Purified DNA was then adenylated using TaqB (Enzymatics) supplemented with dATP for 30 minutes at 68° C. and purified again with AMPure DNA XP beads (Agencourt). Nextera adaptator B was then generated by annealing two oligonucleotides: 5′-PO₄—CTGTCTCTTATACACATCTCCGAGCCCACGAGAC-InvdT-3′ (SEQ ID NO: 91) and 5′-CAAGCAGAAGACGGCATACGAGATTCGCCTTAGTCTCGTGGGCTCGGAGATGTGTATA AGAGACAGT-3′ (SEQ ID NO: 92) together. Annealing was performed by heating 40 μM of each oligonucleotide in annealing buffer (10 mM Tris NaCl pH 7.5, 50 mM NaCl) to 98° C. and then slowly decreasing 0.1° C. each 10 seconds until 4° C. was reached. Nextera adaptator B was ligated using T4 DNA ligase (Enzymatics) overnight at 16° C. DNA was purified again using DNA Ampure XP beads (Agencourt) and barcoding was performed in a qPCR machine using Veraseq DNA polymerase (Enzymatics). Amplification reaction was stopped at the end of the exponential phase. DNA was purified again and quantified using Quant-it PicoGreen DNA assay. Quality and size distribution of the amplified mutant library was assessed on Bioanalyzer using a High Sensitivity DNA Chip. Mutant libraries were then pooled and sequenced by Illumina using the Nextera technology.

[0182] HDTM mutant analysis. Reads were first trimmed based on their quality and the presence of the Nextera Illumina adapter using Trimmomatic, version 0.32, with the parameters SLIDINGWINDOW:4:20 and MINLEN:30 (Bolger et al., 2014). The quality of the reads, before and after trimming, was assessed with FastQC using the default parameters (Andrew, 2010). Reads mapping on EcN's chromosome were filtered out and the remaining reads were mapped onto TP114. These alignments were done with BWA MEM using the default parameters (Li, 2013). Alignments with a mapping quality score lower than 30 were discarded. The position of the middle base pair of the 9 bp Tn5 insertion site duplication was then used to represent every corresponding alignment (Goryshin et al., 1998). Insertion sites only represented by one read were discarded in an attempt to filter out sequencing noise. The insertion maps with normalized reads count (based on the library size) were then visualized using UCSC Genome Browser in a Box (Haeussler et al., 2015). The essentiality of the genes in condition 1 was verified manually, searching for low coverage regions that were mappable and reproducible in all of the three replicates. A gene count table was then generated by calculating the normalized read count (based on library size) of each TP114's gene for each condition. Insertion sites in the first 5% and last 15% of the gene were not considered in the read count as they may lead to functional gene fragments. The genes important for in vitro and in vivo conjugation were determined based on the gene read count ratio between condition 1 and the test condition. The formula used to compute the gene read count ratios is: (Read count x−Read count 1)/Read count 1. A core set of genes which were considered to be essential for conjugation in vitro (traABCDEGHIJK, trbJ, nikAB) and in vivo (pilLNOPQRSUV) were then used to set the maximal ratio value for each condition. All genes with gene count ratios below the maximal value were considered essential in the given condition.

[0183] 2.1—TP114 Conjugative Plasmid Comparative Genomics

[0184] TP114 sequencing and annotation. In Example I, TP114 was identified to be the most potent conjugative plasmid for DNA cargo delivery in vivo. Therefore, it was the most interesting plasmid to be used as transfer machinery for the COP system. However, little is known about TP114. The first step toward the comprehension of TP114's transfer efficiency in vivo was thus to determine its complete sequence. TP114 was sequenced within an E. coli MG1655 strain using Illumina and Oxford Nanopore sequencing technologies. Sequence was then assembled in several ways including reference mapping onto related plasmid R721 from the IncI2 plasmid family and de novo sequence assembly. Then, the plasmid was automatically annotated using RAST to find potential ORFs. Annotation was then rectified by comparing them to annotations from R721 based on sequence homology. Genes with over 98% nucleotide homology to a gene on R721 were re-annotated to be consistent between plasmids. TP114's full sequence and annotation was then submitted to Genbank under accession number: MF521836.1. Plasmid TP114 is 64,818 bp long containing 92 CDS and has an average G+C proportion of 43%. TP114's genes were further characterized using BLASTn and CDsearchto find functional homologs. As conjugative plasmids tend to be modular, each gene was then attributed to a specific module with a specific function (type IV secretion system (T4SS), mating pair stabilization, maintenance, regulation, selection and unknown function). Genes were then mapped onto TP114 to generate a first graphical map of TP114's genes (FIG. 7).

[0185] TP114 gene conservation analysis. One way to determine the importance of a specific gene present on a conjugative plasmid is to analyse its conservation. The conservation of genes can be evaluated by sequence homology against closely related conjugative plasmids. Fortunately, conjugative plasmids have been categorized in incompatibility families based on their ability to be stably maintained in the same cell or to be targeted by the same bacteriophage. The inability of two plasmids to share a same host is often linked to similarity between replication protein sequences. As such, since the primary sequence of TP114's replication protein is highly similar to the one of R721, which belongs to the IncI2 plasmid subfamily, TP114 was classified as an IncI2 plasmid. The IncI plasmid family is divided in two subfamilies, IncI1 and IncI2 and it is still unclear how much both groups share sequence homology. Therefore, comparative genomics analysis was carried on both plasmid subfamilies. Seven plasmids of both IncI1 and IncI2 subfamilies were selected based on the availability of their full genome sequence in Genbank (NCBI) (Table 5). These plasmids were then used as database for homology analysis with TP114 using the stand-alone BRIG software. TP114's genes were mostly highly conserved throughout the IncI2 plasmids both at the nucleic acid and amino acid levels (FIG. 8.A and FIG. 8.B). This suggested that most IncI2 plasmids could share TP114's ability to transfer DNA efficiently in vivo. Homology towards IncI1 plasmids was really scarce both at the nucleic acid and amino acid levels (FIG. 8.0 and FIG. 8.D). Even though gene functions are similar between IncI1 and IncI2 groups, high sequence divergence was found between these two subfamilies. Therefore, for the analysis of gene conservation, only the IncI2 subfamily had been considered since sequence homology with the IncI1 group was too low. Genes were categorized into 3 groups: core, soft core and accessory (Table 6). Core genes were conserved in all plasmids of the IncI2 family whereas the soft-core genes were conserved in >50% of the plasmids. Finally, genes were considered accessory if they were present in <50% of the plasmids.

TABLE 5
Plasmids used in the comparative genomic analysis.

| | Incompatibility | Lenght | NCBI accession |
|---|---|---|---|
| Plasmid name | group | (bp) | number |
| pESBL-117 | Incl1 | 89503 | CP008734 |
| pESBL-315 | Incl1 | 93037 | CP008738 |
| pESBL-12 | Incl1 | 96463 | CP008735 |
| pE17.16 | Incl1 | 101321 | CP008733 |
| pESBL-305 | Incl1 | 107552 | CP008737 |
| pESBL-283 | Incl1 | 110137 | CP008736 |
| R64 | Incl1 | 120826 | NC_005014.1 |
| TP114 | Incl2 | 64818 | MF521836.1 |
| pChi7122-3 | Incl2 | 56676 | FR851304 |
| LN623683.2 | Incl2 | 62139 | LN623683.2 |
| pHN1122-1 | Incl2 | 62196 | JN797501 |
| pSly21 | Incl2 | 63329 | NZ_CP016405.1 |
| pSH146_65 | Incl2 | 65030 | JN983044 |
| pHNY2 | Incl2 | 65358 | KF601686.2 |
| R721 | Incl2 | 75582 | AP002527.1 |

TABLE 6
TP114 in silico gene function prediction by CDsearch and BLAST.

| | | name in | Protein family/ | Known homolog/ | |
|---|---|---|---|---|---|
| module | Locus tag | TP114 | Identity | Function | Conservation |
| T4SS | TP114-003 | traA | pfam04610 | virB6 | Core |
| | TP114-004 | trbJ | pfam07996 | virB5 | Core |
| | TP114-012 | traB | pfam01464 | virB1 | Core |
| | TP114-013 | traC | BLASTx 99% identity | virB2 | Core |
| | TP114-014 | traD | pfam05101 | virB3 | Core |
| | TP114-015 | traE | pfam03135 | virB4 | Core |
| | TP114-016 | traF | BLASTx 100% identity | R721 traF (virB7) | Core |
| | TP114-017 | traG | pfam04335 | virB8 | Core |
| | TP114-018 | traH | pfam03524 | virB9 | Core |
| | TP114-019 | traI | pfam03743 | virB10 | Core |
| | TP114-020 | traJ | pfam00437 | virB11 | Core |
| | TP114-021 | traK | pfam02534 | virD4 | Core |
| Mating Pair | TP114-009 | pilL | pfam10671 | tcpQ | Core |
| Stabilization | TP114-010 | pilM | pfam07419 | pilM | Core |
| | TP114-022 | pilN | TIGR02520 | pilN | Core |
| | TP114-023 | pilO | pfam06864 | pilO | Core |
| | TP114-024 | pilP | TIGR03021 | pilP | Core |
| | TP114-025 | pilQ | pfam00437 | virB11 | Core |
| | TP114-026 | pilR | pfam00482 | T2SSF | Core |
| | TP114-027 | pilS | pfam08805 | pilS | Core |
| | TP114-028 | pilT | cl00222 | virB1 | Core |
| | TP114-029 | pilU | pfam01478 | Peptidase_A24 | Core |
| | TP114-030 | pilV | pfam04917 | Shufflon_N | Core |
| | TP114-031 | rci | pfam00589 | Phage integrase | Core |
| Mobilization | TP114-041 | nikB | pfam03432 | Relaxase | Core |
| | TP114-042 | nikA | pfam05713 | mobC | Core |
| | TP114-068* | parA | cd02042 | virC1 | Core |
| maintenance | TP114-006 | ygiA | BLASTx 98% identity | DNA primase | Soft-core |
| | TP114-035 | ydiA | BLASTx 99% identity | DNA topoisomerase III | Accessory |
| | TP114-036 | ydgA | cl27597 | DNA topoisomerase IA | Core |
| | TP114-044 | traL | cl27521 | parA | Soft-core |
| | TP114-050 | ycfB | pfam15919 | hicB Anti-toxin | Core |
| | TP114-051 | ycfA | pfam07927 | hicA toxin | Core |
| | TP114-068* | parA | cd02042 | parA | Core |
| | TP114-072 | TP114-072 | cl10143 | Post-Segregation killing protein | Core |
| | TP114-083 | repA | pfam02387 | repA | Core |
| regulatory | TP114-037 | hha | pfam05321 | Haemolysin expression modulating protein | Core |
| | TP114-058 | yajA | pfam15731 | Transcription regulator | Accessory |
| | TP114-069 | yafA | BLASTx 99% identity | cogG Transcription regulator | Core |
| | TP114-070 | yaeC | cd00236 | finO Transcription repressor | Core |
| | TP114-085 | yheC | pfam07180 | CaiF/GrIA transcriptional regulator | Core |
| selection | TP114-008 | kikA | pfam07424 | p-toluenesulfonate degradation (trbM) | Core |
| | TP114-033 | yeaA | pfam00565 | Endonuclease | Core |
| | TP114-043 | TP114-043 | BLASTx 98% identity | Putative zinc transporter | Soft-core |
| | TP114-046 | ycgB | BLASTx 98% identity | valyl-tRNA synthase | Accessory |
| | TP114-049 | TP114-049 | BLASTx 88% identity | valyl-tRNA synthase | Core |
| | TP114-053 | hicB | pfam05534 | Rnase H | Accessory |
| | TP114-054 | TP114-054 | pfam01385 | Transposase | Accessory |
| | TP114-056 | yajC | BLASTx 99% identity | cobalamin biosynthesis (cibX) | Accessory |
| | TP114-073 | yadA | cl26233 | Transposase | Accessory |
| | TP114-074 | yadB | cl26146 | Transposase | Accessory |
| | TP114-075 | tnpA | BLASTx 100% identity | Tn3 familly transposase | Accessory |
| | TP114-076 | aph-III | cd05150 | Aminoglycoside 3′-phosphotransferase | Accessory |
| | TP114-078 | TP114-078 | BLASTx 91% identity | Transposase | Accessory |
| | TP114-079 | TP114-079 | pfam04986 | Transposase | Accessory |
| | TP114-080 | TP114-080 | BLASTx 100% identity | IS91 transposase | Core |
| | TP114-087 | ydhA | cd08826 | Stomatin-like protein | Core |
| | TP114-089 | yhcA | cl00686 | Regulation of membrane protease activity | Core |
| Unknown | TP114-001 | yhaB | None | Unknown | Core |
| function | TP114-002 | yhaA | None | Unknown | Core |
| | TP114-005 | TP114-005 | None | Unknown | Accessory |
| | TP114-007 | yggB | None | Unknown | Core |
| | TP114-011 | ygeA | None | Unknown | Core |
| | TP114-032 | yebA | None | Unknown | Core |
| | TP114-034 | YdjA | None | Unknown | Accessory |
| | TP114-038 | TP114-038 | None | Unknown | Accessory |
| | TP114-039 | TP114-039 | None | Unknown | Accessory |
| | TP114-040 | yddA | None | Unknown | Core |
| | TP114-045 | TP114-045 | None | Unknown | Soft-core |
| | TP114-047 | TP114-047 | None | Unknown | Accessory |
| | TP114-048 | TP114-048 | None | Unknown | Accessory |
| | TP114-052 | yceB | None | Unknown | Core |
| | TP114-055 | TP114-055 | None | Unknown | Core |
| | TP114-057 | TP114-057 | None | Unknown | Core |
| | TP114-059 | yaiB | None | Unknown | Accessory |
| | TP114-060 | TP114-060 | None | Unknown | Core |
| | TP114-061 | yaiA | None | Unknown | Accessory |
| | TP114-062 | yahA | None | Unknown | Accessory |
| | TP114-063 | TP114-063 | None | Unknown | Soft-core |
| | TP114-064 | TP114-064 | None | Unknown | Core |
| | TP114-065 | yagA | None | Unknown | Core |
| | TP114-066 | TP114-066 | None | Unknown | Core |
| | TP114-067 | TP114-067 | None | Unknown | Core |
| | TP114-071 | TP114-071 | None | Unknown | Core |
| | TP114-077 | TP114-077 | None | Unknown | Accessory |
| | TP114-081 | TP114-081 | None | Unknown | Core |
| | TP114-082 | TP114-082 | None | Unknown | Core |
| | TP114-084 | TP114-084 | None | Unknown | Core |
| | TP114-086 | yheB | pfam06688 | Unknown | Core |
| | TP114-088 | TP114-088 | None | Unknown | Accessory |
| | TP114-090 | TP114-090 | None | Unknown | Core |
| | TP114-091 | yhbB | None | Unknown | Soft-core |
| | TP114-092 | TP114-092 | None | Unknown | Soft-core |

*This gene might have a function in more than one module.

[0186] TP114 encoded for a mating pair stabilization module. One interesting feature shared by I-complex plasmids (IncB/O (Inc10), IncI1, IncI2, IncK and incZ alike) is the presence of genes encoding a functional type IV pilus (T4P) (Sekizuka et al., 2017). As observed with other plasmids from the I-complex, TP114 encoded a T4P that was independent from the traditional T4SS. Such an apparatus is thought to improve mating pair stabilization (hereby named mating pair stabilization module) by binding directly to the recipient's membrane and retracting the pilus to facilitate donor/recipient direct contact (Bradley, 1984). Very few plasmid families are known to encode T4P (e.g. IncI1 (Ishiwa et al., 2003), IncI2 (Sekizuka et al., 2017), IncB/O (Inc10) (Papagiannitsis et al., 2011), IncK (Seiffert et al., 2017), and IncZ (Venturini et al., 2013)).

[0187] 2.2—High Density Transposon Mutagenesis of TP114.

[0188] HDTM experiment design. Several HDTM experiments were needed to fully characterize TP114 genes functions. As such, a scheme describing the HDTM is presented to fully comprehend the extent of the experiment (FIG. 9). HDTM step 1 generated a full library of TP114 mutants. At this point, if a transposon interrupts a gene required for short-term plasmid maintenance in the cell, this would lead to plasmid loss. By using antibiotics to select for TP114 and the Tn5 transposon, cells that have lost the plasmid will not survive. Therefore, insertion of Tn5 within essential maintenance genes will prevent those genes from being sequenced resulting on low coverage of their loci. This HDTM library 1 was then used in two different conjugation experiments, one where the TP114::Tn5 were transferred by solid mating in vitro (Step 2) and one where the mating was carried in vivo (Step 4 where transconjugants originated from the feces and Step 6 where the transconjugants were retrieved from the caecum). The HDTM library 2 revealed genes essential for conjugation in vitro whereas HDTM library 4 and 6 revealed genes essential for conjugation in vivo, which allowed us to discriminate between genes required in both environments and genes only required in one specific environment. The HDTM library 2 was further used as donors in two supplementary mating experiments in vitro (Step 3) and in vivo (Step 5 for feces extracted transconjugants and Step 7 for caecum extracted transconjugants). This second transfer is expected to enrich genes which once inactivated by the Tn5 transposon have a positive effect on conjugation efficiency (e.g. a transcription repressor). Furthermore, a second transfer step ensured minimal background by diluting the initial donor cells. Finally, HDTM step 8 required the transfer of the modified TP114::tetB into HDTM library 2. Conjugative plasmids of a same incompatibility family can usually prevent the acquisition of another related plasmids through a mechanism called exclusion. Since TP114 can mediate exclusion, TP114::tetB can only enter the cell if the exclusion related gene(s) are interrupted by the Tn5 transposon.

[0189] HDTM analysis consideration. Analysis of the HDTM mutant libraries revealed an average coverage of 9.68 insertions per bp in TP114. This high resolution allowed us to assess the essentiality of even the smallest annotated TP114 gene. However, TP114 encodes a set of 7 genes containing repeated regions in which reads cannot be mapped (termed 0-mappability regions) (Table 7). Those genes appeared under-represented, but were not necessarily essential and were analyzed by considering only the portion of the gene that was mappable. The HDTM experiment also accounted for possible donor DNA contamination. By doing successive transfer experiment with the HDTM library, background contamination was drastically reduced and showed consistent results. As such, a clear drop in background level was seen from HDTM library 2 to HDTM library 3 and consistent results were observed between libraries (FIG. 10). The HDTM analysis also took advantage of a high number of replicates and conditions to allow for comparison of read count between conditions and between biological replicates. Similarity between replicates and conditions was evaluated by Pearson Correlation and revealed well correlated replicates and weaker correlation between the different conditions (FIG. 11). This kind of distribution was expected as different conditions will put different selective pressure onto the population of mutants, selecting the mutants with the best fits for each specific condition. Only replicates from mice group C of HDTM library 4 and 6 was weakly correlated to others and was discarded from the analysis.

TABLE 7
0-mappability regions in TP114.

| Gene | Length (bp) | 0-map bp | % mappable |
|---|---|---|---|
| TP114-049 | 327 | 22 | 93.27% |
| TP114-057 | 216 | 156 | 27.78% |
| TP114-063 | 216 | 77 | 64.35% |
| TP114-064 | 147 | 70 | 52.38% |
| TP114-066 | 138 | 76 | 44.93% |
| TP114-067 | 165 | 67 | 59.39% |
| ycgB | 450 | 22 | 95.11% |

[0190] HDTM identified important features for TP114 replication and maintenance. The first step of HDTM was to generate a mutant library with insertion in all genes (Library 1). In this set-up, only insertions in the sequences important for the replication and maintenance of TP114 should produce non-viable clones. Therefore, genes important for replication should be underrepresented in the read coverage as compared to other genes. As suspected, most genes had high insertion coverage except for a core set of 6 genes which were reproducibly under-represented (FIG. 12). Among those, repA was already suspected to be a critical actor in plasmid maintenance, and the aph-Ill gene was used for transconjugant selection and therefore would appear essential. The list of essential genes for replication and maintenance is shown in Table 8. Most of these genes were already suspected to be part of the maintenance module or were highly conserved in the IncI2 family. However, ygiA (TP114-006), ydiA (TP114-035), ydgA (TP114-036), traL (TP114-044) and TP114-072 that were predicted to be implicated in plasmid maintenance were found to be dispensable by HDTM. There was a possibility that these genes were not required for plasmid maintenance in E. coli due to functional redundancy, but could be involved in plasmid maintenance in other host species. Some genes, like traL, might be implicated in another function of the conjugative plasmid. Nonetheless, the gene function prediction was mostly in agreement with the HDTM results.

TABLE 8
Revised list of essential maintenance genes.

| Predicted module | Locus tag | name in TP114 | Predicted Function | Conservation |
|---|---|---|---|---|
| maintenance | TP114-050 | ycfB | hicB Anti-toxin | Core |
| maintenance | TP114-051 | ycfA | hicA toxin | Core |
| maintenance | TP114-068 | parA | Partition | Core |
| selection | TP114-076 | aph-III | Kanamycin resistance | Accessory |
| unknown function | TP114-082 | TP114-082 | Unknown | Core |
| maintenance | TP114-083 | repA | Replication initiation | Core |

[0191] Identification of TP114 genes essential for in vitro conjugation on solid medium. Gene importance for in vitro mating on solid medium was evaluated by gene count ratios. Gene count ratios were calculated by comparing the number of reads that map in a given gene in two different contexts. Briefly, genes which became under-represented following conjugative transfer in vitro (libraries 2 and 3 as compared to library 1) gave negative gene count ratio. To assess gene essentiality and account for any bias, a set of gene, which were predicted to be essential for conjugation (traABCDEFGHIJK, trbJ, nikAB), was used to evaluate the maximal and average gene count ratio of essential genes. However, traF had a high gene count ratio and was considered an outlier and not essential for conjugation. Gene distribution was plotted for both HDTM library 2 and 3 (FIG. 13) and all genes bellow the maximum gene count ratio value were considered essential for conjugation in the given library. Genes that were already determined to be implicated in plasmid maintenance were discarded. The list of genes essential for TP114 conjugation in vitro is shown in Table 9.

TABLE 9
Important genes for in vitro conjugation.

| Predicted | | name | Predicted | | |
|---|---|---|---|---|---|
| module | Locus tag | in TP114 | Function | Conservation | Library |
| Unknown function | TP114-001 | yhaB | Unknown | Core | 2, 3 |
| Unknown function | TP114-002 | yhaA | Unknown | Core | 3 |
| T4SS | TP114-003 | traA | VirB6 | Core | 2, 3 |
| T4SS | TP114-004 | trbJ | VirB5 | Core | 2, 3 |
| Unknown function | TP114-011 | ygeA | Unknown | Core | 3 |
| T4SS | TP114-012 | traB | VirB1 | Core | 2, 3 |
| T4SS | TP114-013 | traC | VirB2 | Core | 2, 3 |
| T4SS | TP114-014 | traD | VirB3 | Core | 2, 3 |
| T4SS | TP114-015 | traE | VirB4 | Core | 2, 3 |
| T4SS | TP114-017 | traG | VirB8 | Core | 2, 3 |
| T4SS | TP114-018 | traH | VirB9 | Core | 2, 3 |
| T4SS | TP114-019 | traI | VirB10 | Core | 2, 3 |
| T4SS | TP114-020 | traJ | VirB11 | Core | 2, 3 |
| T4SS | TP114-021 | traK | VirD4 | Core | 2, 3 |
| Mobilization | TP114-041 | nikB | Relaxase | Core | 2, 3 |
| Mobilization | TP114-042 | nikA | mobC | Core | 2, 3 |
| Selection | TP114-043 | TP114-043 | Putative zinc | Soft-core | 2 |
| | | | transporter | | |
| Regulation | TP114-058 | yaj4 | Transcription | Accessory | 2, 3 |
| | | | regulator | | |
| Unknown function | TP114-060 | TP114-060 | Unknown | Core | 2, 3 |
| Regulation | TP114-069 | yafA | cogG Transcription | Core | 3 |
| | | | regulator | | |

[0192] Identification of genes important for TP114 conjugation in vivo. Gene essentiality for in vivo conjugation of TP114 was carried out similarly to the in vitro analysis. However, the set used to fix the maximum gene count ratio was composed of pilLMNOPQRSTUV as it was apparent that pil genes were essential only for in vivo conjugation (FIG. 14). The pilM and pilT genes were removed from the set as they were outliers. It was critical to use genes which are suspected to be important only in vivo, at least for HDTM library 5 and 7. Indeed, the HDTM library 5 and 7 were generated by in vivo conjugation of HDTM library 2, which in turn is generated from an in vitro transfer of HDTM library 1. As such, since the first in vitro mating put a strong selective pressure for plasmids that can transfer in vitro and genes that are essential in vitro can also be essential in vivo, seeding with these genes excluded the majority of the genes that were only essential in vivo. Nonetheless, as 4 different conditions, including 12 total mice, were used for in vivo conjugation, gene essentiality can also be evaluated by consistency between replicates from the same or different conditions. Genes which were below the threshold for any of the in vivo conditions are listed in Table 10. However, genes which were already proven to be important for plasmid maintenance were not included in this table, as the gene count ratio would often lead to division by 0. When HDTM library 1 was used as donor cells for in vivo conjugation (conditions 4 and 6), 40 genes were found to be essential in the feces samples, and 36 in the caecum samples. Of these genes, 31 were shared in both conditions. Consistently, for the conjugation of HDTM library 2 in vivo (conditions 5 and 7), 40 genes were found to be important in feces samples and 37 genes were found to be important in the caecum samples, with 33 shared genes. In total, 40 genes were found to be important in at least one condition, of which 31 were shared in all conditions. Interestingly, most of the genes important for in vitro conjugation were also important for in vivo conjugation. As condition 5 and 7 follow an in vitro conjugation, this was expected. Additionally, most of pil genes were essential for in vivo transfer, with pilM and pilT being the only two exceptions.

TABLE 10
List of important genes for in vivo conjugation.

| Predicted | | name in | Predicted | | |
|---|---|---|---|---|---|
| module | Locus tag | TP114 | Function | Conservation | Library |
| Unknown function | TP114-001 | yhaB | Unknown | Core | 4, 5, 6, 7 |
| Unknown function | TP114-002 | yhaA | Unknown | Core | 4, 5, 6, 7 |
| T4SS | TP114-003 | traA | virB6 | Core | 4, 5, 6, 7 |
| T4SS | TP114-004 | trbJ | virB5 | Core | 4, 5, 6, 7 |
| selection | TP114-008 | kikA | p-toluenesulfonate | Core | 4, 5, 6 |
| | | | degradation (trbM) | | |
| Mating Pair | TP114-009 | pilL | tcpQ | Core | 4, 5, 6, 7 |
| Stabilization | | | | | |
| Unknown function | TP114-011 | ygeA | Unknown | Core | 4, 5, 6, 7 |
| T4SS | TP114-012 | traB | virB1 | Core | 5, 6, 7 |
| T4SS | TP114-013 | traC | virB2 | Core | 4, 5, 6, 7 |
| T4SS | TP114-014 | traD | virB3 | Core | 4, 5, 6, 7 |
| T4SS | TP114-015 | traE | virB4 | Core | 4, 5, 6, 7 |
| T4SS | TP114-017 | traG | virB8 | Core | 4, 5, 6, 7 |
| T4SS | TP114-018 | traH | virB9 | Core | 4, 5, 6, 7 |
| T4SS | TP114-019 | traI | virB10 | Core | 4, 5, 6, 7 |
| T4SS | TP114-020 | traJ | virB11 | Core | 4, 5, 6, 7 |
| T4SS | TP114-021 | traK | virD4 | Core | 4, 5, 6, 7 |
| Mating Pair | TP114-022 | pilN | pilN | Core | 4, 5, 6, 7 |
| Stabilization | | | | | |
| Mating Pair | TP114-023 | pilO | pilO | Core | 4, 5, 6, 7 |
| Stabilization | | | | | |
| Mating Pair | TP114-024 | pilP | pilP | Core | 4, 5, 6, 7 |
| Stabilization | | | | | |
| Mating Pair | TP114-025 | pilQ | virB11 | Core | 4, 5, 6, 7 |
| Stabilization | | | | | |
| Mating Pair | TP114-026 | pilR | T2SSF | Core | 4, 5, 6, 7 |
| Stabilization | | | | | |
| Mating Pair | TP114-027 | pilS | pilS | Core | 4, 5, 6, 7 |
| Stabilization | | | | | |
| Mating Pair | TP114-029 | pilU | Peptidase_A24 | Core | 4, 5, 6, 7 |
| Stabilization | | | | | |
| Mating Pair | TP114-030 | pilV | Shufflon_N | Core | 4, 5, 6, 7 |
| Stabilization | | | | | |
| Mobilization | TP114-041 | nikB | Relaxase | Core | 4, 5, 6, 7 |
| Mobilization | TP114-042 | nikA | mobC | Core | 4, 5, 6, 7 |
| selection | TP114-043 | TP114-43 | Putative zinc | Soft-core | 5, 7 |
| | | | transporter | | |
| maintenance | TP114-044 | traL | parA | Soft-core | 4, 5, 7 |
| Regulation | TP114-058 | yajA | Transcription | Accessory | 4, 5, 6, 7 |
| | | | regulator | | |
| Unknown function | TP114-059 | yaiB | Unknown | Accessory | 4, 5, 6, 7 |
| Unknown function | TP114-060 | TP114-060 | Unknown | Core | 4, 5, 6, 7 |
| Regulation | TP114-069 | yafA | cogG | Core | 4, 5, 6, 7 |
| | | | Transcription | | |
| | | | regulator | | |
| Regulation | TP114-085 | yheC | CaiF/GrlA | Core | 4 |
| | | | transcriptional | | |
| | | | regulator | | |
| Unknown function | TP114-086 | yheB | Unknown | Core | 4, 5, 6, 7 |
| selection | TP114-087 | ydhA | Stomatin-like | Core | 4, 5, 6, 7 |
| | | | protein | | |
| Unknown function | TP114-088 | TP114-088 | Unknown | Accessory | 4 |
| selection | TP114-089 | yhcA | Regulation of | Core | 4 |
| | | | membrane | | |
| | | | protease activity | | |
| Unknown function | TP114-090 | TP114-090 | Unknown | Core | 5 |
| Unknown function | TP114-091 | yhbB | Unknown | Soft-core | 5 |
| Unknown function | TP114-092 | TP114-092 | Unknown | Soft-core | 4 |

[0193] TP114 possessed a core set of genes that were important for conjugation. Performing HDTM with a high number of biological replicates allowed us to attribute confidence level to the importance of each gene for different functions of TP114 (Table 11). The confidence level was based on reproducibility of the result, with ++ being the highest confidence level and − being the lowest. For plasmid maintenance, confidence level was attributed differently than other conditions. A confidence level of ++ meant that the genes were essential in all replicates and − meant it was not essential in at least one condition. For all other conditions, confidence level is based on the degrees of reproducibility between conditions, with ++ meaning the gene was essential in all conditions, + meaning it was essential in only one of the conditions and − meaning it was never essential

TABLE 11
Confidence level of the importance of TP114 genes for conjugation and maintenance

| | | Essentiality confidence level | | | | |
|---|---|---|---|---|---|---|
| Locus | name in | | in vitro | in vivo | in vitro and in vivo | |
| tag | TP114 | maintenance | conjugation | conjugation only | conjugation | Conservation |
| TP114- | yhaB | − | ++ | ++ | ++ | Core |
| 001 | | | | | | |
| TP114- | yhaA | − | + | ++ | ++ | Core |
| 002 | | | | | | |
| TP114- | traA | − | ++ | ++ | ++ | Core |
| 003 | | | | | | |
| TP114- | trbJ | − | ++ | ++ | ++ | Core |
| 004 | | | | | | |
| TP114- | TP114- | − | − | − | − | Accessory |
| 005 | 005 | | | | | |
| TP114- | ygiA | − | − | − | − | Soft-core |
| 006 | | | | | | |
| TP114- | yggB | − | − | − | − | Core |
| 007 | | | | | | |
| TP114- | kikA | − | − | ++ | + | Core |
| 008 | | | | | | |
| TP114- | pilL | − | − | ++ | ++ | Core |
| 009 | | | | | | |
| TP114- | pilM | − | − | − | − | Core |
| 010 | | | | | | |
| TP114- | ygeA | − | + | ++ | ++ | Core |
| 011 | | | | | | |
| TP114- | traB | − | ++ | + | ++ | Core |
| 012 | | | | | | |
| TP114- | traC | − | ++ | ++ | ++ | Core |
| 013 | | | | | | |
| TP114- | traD | − | ++ | ++ | ++ | Core |
| 014 | | | | | | |
| TP114- | traE | − | ++ | ++ | ++ | Core |
| 015 | | | | | | |
| TP114- | traF | − | − | − | − | Core |
| 016 | | | | | | |
| TP114- | traG | − | ++ | ++ | ++ | Core |
| 017 | | | | | | |
| TP114- | traH | − | ++ | ++ | ++ | Core |
| 018 | | | | | | |
| TP114- | traI | − | ++ | ++ | ++ | Core |
| 019 | | | | | | |
| TP114- | traJ | − | ++ | ++ | ++ | Core |
| 020 | | | | | | |
| TP114- | traK | − | ++ | ++ | ++ | Core |
| 021 | | | | | | |
| TP114- | pilN | − | − | ++ | ++ | Core |
| 022 | | | | | | |
| TP114- | pilO | − | − | ++ | ++ | Core |
| 023 | | | | | | |
| TP114- | pilP | − | − | ++ | ++ | Core |
| 024 | | | | | | |
| TP114- | pilQ | − | − | ++ | ++ | Core |
| 025 | | | | | | |
| TP114- | pilR | − | − | ++ | ++ | Core |
| 026 | | | | | | |
| TP114- | pilS | − | − | ++ | ++ | Core |
| 027 | | | | | | |
| TP114- | pilT | − | − | − | − | Core |
| 028 | | | | | | |
| TP114- | pilU | − | − | ++ | ++ | Core |
| 029 | | | | | | |
| TP114- | pilV | − | − | ++ | ++ | Core |
| 030 | | | | | | |
| TP114- | rci | − | − | − | − | Core |
| 031 | | | | | | |
| TP114- | yebA | − | − | − | − | Core |
| 032 | | | | | | |
| TP114- | yeaA | − | − | − | − | Core |
| 033 | | | | | | |
| TP114- | YdjA | − | − | − | − | Accessory |
| 034 | | | | | | |
| TP114- | ydiA | − | − | − | − | Accessory |
| 035 | | | | | | |
| TP114- | ydgA | − | − | − | − | Core |
| 036 | | | | | | |
| TP114- | hha | − | − | − | − | Core |
| 037 | | | | | | |
| TP114- | TP114- | − | − | − | − | Accessory |
| 038 | 038 | | | | | |
| TP114- | TP114- | − | − | − | − | Accessory |
| 039 | 039 | | | | | |
| TP114- | yddA | − | − | − | − | Core |
| 040 | | | | | | |
| TP114- | nikB | − | ++ | ++ | ++ | Core |
| 041 | | | | | | |
| TP114- | nikA | − | ++ | ++ | ++ | Core |
| 042 | | | | | | |
| TP114- | TP114- | − | + | − | ++ | Soft-core |
| 043 | 043 | | | | | |
| TP114- | traL | − | − | + | ++ | Soft-core |
| 044 | | | | | | |
| TP114- | TP114- | − | − | − | − | Soft-core |
| 045 | 045 | | | | | |
| TP114- | ycgB | − | − | − | − | Accessory |
| 046 | | | | | | |
| TP114- | TP114- | − | − | − | − | Accessory |
| 047 | 047 | | | | | |
| TP114- | TP114- | − | − | − | − | Accessory |
| 048 | 048 | | | | | |
| TP114- | TP114- | − | − | − | − | Core |
| 049 | 049 | | | | | |
| TP114- | ycfB | ++ | ++ | ++ | ++ | Core |
| 050 | | | | | | |
| TP114- | ycfA | ++ | ++ | ++ | ++ | Core |
| 051 | | | | | | |
| TP114- | yceB | − | − | − | − | Core |
| 052 | | | | | | |
| TP114- | hicB | − | − | − | − | Accessory |
| 053 | | | | | | |
| TP114- | TP114- | − | − | − | − | Accessory |
| 054 | 054 | | | | | |
| TP114- | TP114- | − | − | − | − | Core |
| 055 | 055 | | | | | |
| TP114- | yajC | − | − | − | − | Accessory |
| 056 | | | | | | |
| TP114- | TP114- | − | − | − | − | Core |
| 057 | 057 | | | | | |
| TP114- | yajA | − | ++ | ++ | ++ | Accessory |
| 058 | | | | | | |
| TP114- | yaiB | − | − | ++ | ++ | Accessory |
| 059 | | | | | | |
| TP114- | TP114- | − | ++ | ++ | ++ | Core |
| 060 | 060 | | | | | |
| TP114- | yaiA | − | − | − | − | Accessory |
| 061 | | | | | | |
| TP114- | yahA | − | − | − | − | Accessory |
| 062 | | | | | | |
| TP114- | TP114- | − | − | − | − | Soft-core |
| 063 | 063 | | | | | |
| TP114- | TP114- | − | − | − | − | Core |
| 064 | 064 | | | | | |
| TP114- | yagA | − | − | − | − | Core |
| 065 | | | | | | |
| TP114- | TP114- | − | − | − | − | Core |
| 066 | 066 | | | | | |
| TP114- | TP114- | − | − | − | − | Core |
| 067 | 067 | | | | | |
| TP114- | parA | ++ | ++ | ++ | ++ | Core |
| 068 | | | | | | |
| TP114- | yafA | − | ++ | ++ | ++ | Core |
| 069 | | | | | | |
| TP114- | yaeC | − | − | − | − | Core |
| 070 | | | | | | |
| TP114- | TP114- | − | − | − | − | Core |
| 071 | 071 | | | | | |
| TP114- | TP114- | − | − | − | − | Core |
| 072 | 072 | | | | | |
| TP114- | yadA | − | − | − | − | Accessory |
| 073 | | | | | | |
| TP114- | yadB | − | − | − | − | Accessory |
| 074 | | | | | | |
| TP114- | tnpA | − | − | − | − | Accessory |
| 075 | | | | | | |
| TP114- | aph-III | − | − | − | − | Accessory |
| 076 | | | | | | |
| TP114- | TP114- | − | − | − | − | Accessory |
| 077 | 077 | | | | | |
| TP114- | TP114- | − | − | − | − | Accessory |
| 078 | 078 | | | | | |
| TP114- | TP114- | − | − | − | − | Accessory |
| 079 | 079 | | | | | |
| TP114- | TP114- | − | − | − | − | Core |
| 080 | 080 | | | | | |
| TP114- | TP114- | − | − | − | − | Core |
| 081 | 081 | | | | | |
| TP114- | TP114- | ++ | ++ | ++ | ++ | Core |
| 082 | 082 | | | | | |
| TP114- | repA | ++ | ++ | ++ | ++ | Core |
| 083 | | | | | | |
| TP114- | TP114- | − | − | − | − | Core |
| 084 | 084 | | | | | |
| TP114- | yheC | − | − | + | − | Core |
| 085 | | | | | | |
| TP114- | yheB | − | − | ++ | ++ | Core |
| 086 | | | | | | |
| TP114- | ydhA | − | − | ++ | ++ | Core |
| 087 | | | | | | |
| TP114- | TP114- | − | − | + | − | Accessory |
| 088 | 088 | | | | | |
| TP114- | yhcA | − | − | + | − | Core |
| 089 | | | | | | |
| TP114- | TP114- | − | − | − | + | Core |
| 090 | 090 | | | | | |
| TP114- | yhbB | − | − | − | + | Soft-core |
| 091 | | | | | | |
| TP114- | TP114- | − | − | + | − | Soft-core |
| 092 | 092 | | | | | |

[0194] Confirmation of the TP114 mating pair stabilization module's essentiality for in vivo conjugation. The role of the T4P (pil genes) in mating pair stabilization in vitro was suspected for R721, another model plasmid of the IncI2 family. However, TP114 HDTM data suggested that the genes predicted to be involved in the formation of the T4P were essential for conjugation in vivo. This meant that the T4P was not required in vitro for solid mating and that the differences in environmental conditions made the T4P essential in vivo. To confirm this hypothesis, a complete abolition of the T4P functions would be desirable. The prepilin gene pilS was first selected for deletion as the HDTM data revealed a strong dependence on this gene for in vivo conjugation, and because of its crucial role in the structure of the T4P. The prepilin is a major subunit forming the T4P, it is first processed into pilin by specific peptidase and then secreted and assembled into a pilus. Deleting pilS is thus expected to abolish the formation of the pilus and prevent its assembly. The pilS gene was deleted from TP114 using a recombination approach. The resulting TP114ΔpilS::cat was then transferred by solid mating conjugation in KN01 for further testing. As such, TP114ΔpilS::cat was tested for its ability to conjugate from KN01 to KN03 in solid, liquid, and agitating liquid conditions (FIG. 16.A). Whereas the ability of TP114ΔpilS::cat to transfer during solid mating remained unchanged, a drastic drop in transfer efficiency was observed in the presence or absence of shaking in liquid. This suggests that conjugation efficiency of TP114ΔpilS::cat was impaired under unstable conditions compared to wild type TP114. Complementation using plasmid pPilS expressing pilS in trans resulted in significant recovery of conjugation rates. To test the involvement of the T4P for conjugation in the intestinal tract, a conjugation experiment was performed using a mouse model. A total of 5 Sm-treated mice were first fed with KN03 as a recipient strain and then with either KN01+TP114 or TP114ΔpilS::cat as donors. Conjugation efficiency was monitored through feces collection for four consecutive days (FIG. 17.A). On the fourth day, mice were sacrificed to compare the conjugation efficiency found in the feces and in the caecum (FIG. 17.B). While wild type TP114 was able to conjugate at its expected frequency (>10⁻¹), TP114ΔpilS::cat was unable to transfer in vivo. This reveals the crucial role of TP114's T4P for in vivo conjugation, and potentially explains the conservation of T4P across IncI2 conjugative plasmids.

[0195] Role of the pilV adhesin variants and the shufflon in TP114. Although the HDTM data indicated that only the N-terminus portion of pilV was essential for in vivo conjugation, it was suspected that this was in fact an artifact of the HDTM method. This anomaly is due to the presence of a shufflon at the C-terminus of pilV that re-organize the end of the gene to produce several variants. The pilV gene encodes an adhesin thought to be responsible for the recognition of the recipient cell by a donor bacterium. The adhesin is believed to be present on the tip of the T4P to establish contact and stabilize the interaction between the two cells. The shufflase was thus deleted to lock the shufflon in a stable conformation in TP114Δrci. Then, to assess the role of pilV and the shufflon for in vivo conjugation, the entire pilV gene was deleted in a first experiment, generating TP114ΔpilV-rci. In another variant, only the shufflon was replaced by a Flag-tag, generating TP114pilVΔshufflon-rci::cat. In yet another series of variants, the pilV gene variants were locked in a specific conformation (TP114pilVΔshufflon::pilV1-cat, TP114pilVΔshufflon::pilV2-cat, TP114pilVΔshufflon::pilV3-cat, TP114pilVΔshufflon::pilV3′-cat, TP114pilVΔshufflon::pilV4-cat, TP114pilVΔshufflon::pilV4′-cat, TP114pilVΔshufflon::pilV5-cat, TP114pilVΔshufflon::pilV5′-cat. This was accomplished to test if the C-terminus portion of pilV was essential for PilV-mediated adhesion, and to elucidate the importance of the different pilV variants. As such, TP114ΔpilV-rci, TP114pilVΔshufflon-rci::cat and all locked pilV variants were transferred to KN01 to test their role in mating pair stabilization. Each construct was transferred to KN03 recipient bacteria by conjugation under solid, liquid static and agitating liquid conditions. The pilV adhesin was found to be essential for conjugation in both liquid conditions, confirming the role of the adhesin in mating pair stabilization (FIG. 16.B). More precisely, the ability of TP114pilVΔshufflon-rci::cat to conjugate on a solid support was slightly decreased as compared to the control, but the ability to conjugate in liquid (shaking or not) was completely abolished (FIG. 16.B). This showed that the C-terminus portion of pilV was essential to generate functional adhesins, contrary to what was suggested by the HDTM data. Furthermore, transfer of TP114 pilV variants between two E. coli cells resulted in high conjugation efficiencies for all PilV configurations on solid medium (FIG. 16.C) while only some variants (namely TP114pilVΔshufflon::pilV3′-cat, TP114pilVΔshufflon::pilV4-cat, and TP114pilVΔshufflon::pilV4′-cat) were proficient for mating pair stabilization and conjugation understatic liquid (FIG. 16.D) and agitating liquid conditions (FIG. 16.E). This indicated that pilV variants recognized different structures at the surface of bacteria, and that these interactions were needed for plasmid transfer. As such, variantsTP114pilVΔshufflon::pilV3′-cat, TP114pilVΔshufflon::piV4-cat, and TP114pilVΔshufflon::pilV4′-cat recognized structures present at the surface of EcN, most likely lipopolysaccharides, while other variants recognized structures not found on EcN. To confirm that this interaction is required for conjugation in vivo, the pilV deletion mutant TP114ΔpilV-rci, one variant recognizing EcN (TP114pilVΔshufflon::pilV4′-cat) or not (TP114pilVΔshufflon::pilV1-cat) was used for an in vivo conjugation assay using KN03 as a recipient (FIG. 17.C). In this assay, only TP114pilVΔshufflon::pilV4′-cat was able to conjugate in vivo, confirming that the binding of a PilV adhesin to the surface of a recipient bacterium is needed for in vivo conjugation.

[0196] Identification of an exclusion protein of TP114. Exclusion and incompatibility are two mechanisms that prevent two plasmids to share a same cell. Whereas incompatibility is passive and occurs when two replication or maintenance system are too similar, exclusion is an active mechanism that prevent either cell-cell contact or DNA entry in the recipient. The existence and extent of exclusion in TP114 was first verified. To do so, a conjugation experiment from KN02 to KN01 bearing six different conjugative plasmids was carried. The selected plasmids spanned six incompatibility families and those families were first categorized based on incompatibility and exclusion, only TP114 should be able to mediate its own exclusion. As expected, the exclusion phenomenon was only observed with TP114 transferring to a TP114 bearing recipient (FIG. 18.A) (FIG. 18.B). However, in this experiment, it was impossible to discern incompatibility from maintenance and exclusion. This was addressed using a mobilizable plasmid pCloDF13 capable of hijacking TP114's T4SS to conjugate, but which uses a completely different replication mechanism. As shown in FIG. 18.B, the exclusion ratio of both TP114 and pCloDF13 were similar which proved that TP114 is subjected to exclusion. In a last effort to characterize this resistance mechanism, an exclusion experiment was carried in vivo where KN01+TP114 and KN02+TP114::tetB were used as conjugation pairs. Exclusion was found to be even more stringent in this environment, barely even producing transconjugants over a period of 4 days (FIG. 18.C). Of note, results were consistent between the feces and the caecum (FIG. 18.D). Using the HDTM library 2, the gene responsible for exclusion was investigated. In the final step of HDTM, TP114::tetB was transferred to the HDTM library 2, and transconjugants were sequenced. Most of the transconjugants had transposon insertions in TP114-005, a gene of previously unknown function (Table 12). To confirm that the exclusion protein was TP114-005, clones from the HDTM library 8 were transferred first to MG1655Nx^{R}, and then back into KN02. The use of two successive rounds of transfers should isolate the TP114::Tn5 clone since in vitro conjugation efficiencies allows TP114 to transfer to 1% of the cells, hereby reducing the transfer to a same recipient cell to a minimum. Also, even with deficient exclusion, incompatibility should prevent the persistence of two different clones of TP114 within a same cell through maintenance incompatibility mechanisms. As insertions in TP114-005 are more frequent, they should also be easily isolated. Exclusion capacity of the three clones of TP114::Tn5 was tested by transferring TP114::tetB from KN01 into KN02. Most of the clones were incapable of exclusion as shown by the high conjugative frequencies (FIG. 19.A) and exclusion ratio (FIG. 19.B). Surprisingly, while testing the ability of these clones to conjugate, exclusion deficient clones were nearly 10-fold more efficient than wild type TP114 (FIG. 19.C). Therefore, it is understood that the TP114-005 gene and the corresponding protein were involved in the exclusion process.

TABLE 12
Over-representation of some genes
in the exclusion HDTM library 8.

| | Replicate | | |
|---|---|---|---|
| Gene | 1 | 2 | 3 |
| TP114-005 | 70.6% | 77.6% | 76.9% |
| ydjA | 1.0% | 0.7% | 0.8% |
| yaeC | 7.7% | 3.8% | 8.9% |
| pilQ | 0.7% | 0.9% | 1.0% |
| ydgA | | 0.7% | 0.6% |
| yaiA | 1.3% | 1.0% | |
| yadA | | 0.7% | 0.5% |
| TP114-080 | 0.7% | 0.7% | |
| TP114-048 | 1.6% | 1.5% | |
| pilR | | 1.5% | 1.5% |
| yebA | | | 0.8% |
| TP114-045 | | | 1.2% |
| pilN | | | 0.9% |
| pilM | 1.2% | | |
| nikB | 0.8% | | |
| hicB | 0.7% | | |

[0197] Identification of genes with detrimental effects on TP114 conjugation. The HDTM experiment helped to discover genes which limit TP114 conjugation transfer frequency. These genes can be determined by looking at genes having a count ratio that increased following each transfer steps. In our experiments, only two genes were found to be detrimental to TP114's transfer both in vitro and in vivo. These genes were TP114-005 (which was previously identified as the exclusion protein) and yaeC (TP114-070) (FIG. 20). Interestingly, gene function analysis revealed that yaeC is a homolog to finO, a transcription factor that represses genes in the IncF family of conjugative plasmid. The yaeC gene is therefore most likely a transcription repressor that limits TP114's transfer, both in vitro and in vivo. The deletion of this gene could be desirable to enhance TP114 transfer both in vitro and in vivo.

### EXAMPLE III—CONSTRUCTION OF CONJUGATIVE DELIVERY SYSTEMS DERIVED FROM TP114

[0198] Strains, plasmids and growth conditions. All strains and plasmids used in this example are described in Table 1. All plasmid sequences are provided in the sequence appendix. Oligonucleotides used in this example are listed in Table 2. Details on strain growth conditions, DNA manipulation, plasmid construction, recombineering and routine transformation can be found in the Material and Method section of the Example I.

[0199] Construction of the loading dock pREC1. pREC1 is a plasmid used as a template to amplify a loading dock cassette and to insert it into the transfer machinery in one simple step. In this example, pREC1 was used to insert a loading dock into the TP114 transfer machinery. To do so, pREC1 was first assembled into a plasmid by Gibson assembly (amplifying the tetB resistance gene from pFG018 and the oriV_{R6K} from pKD4). An FRT and attP_{BXb1} sites were provided by the primer assembly tails. The resulting plasmid pREC1 (FIG. 21.C) was then used as a template for subsequent PCR amplification. The FRT-tetB-attP_{Bxb1} cassette was inserted in TP114 by recombineering, creating TP114::tetB plasmid (Datsenko et al., 2000). This version of TP114 can then be used for the insertion of the genetic cargo by Double Recombinase Operated Insertion of DNA (DROID).

[0200] Construction of pBXB1. The plasmid pBXB1 contains the integrase Bxb1 and was assembled by amplifying the oriV_{pMB1} and the ampicillin resistance gene (bla) from pSB1A3, and the Bxb1 integrase gene from gBlock-Bxbl (FIG. 21.D). The promoter of the Bxb1 integrase allows constitutive expression of the Bxb1 integrase. The two PCR products were purified by SPRI and pBXB1 was constructed by Gibson assembly before transformation in chemically competent EC100Dpir+.

[0201] Double Recombinase Operated Insertion DNA (DROID). To combine on a same vector the genetic cargo and the transfer machinery, a new process hereby termed DROID, was developed (FIG. 22.A). In the present example, the DROID method was used to combine two DNA molecules together without destabilizing the plasmid replication. The DROID method requires both DNA molecules to contain specific integration and recombination sites. For the transfer machinery, the recombination sites are provided by the loading dock present in the tetB insert of TP114::tetB (FIG. 22.B). For the genetic cargo, the recombination sites are provided during its assembly in a temporary backbone termed «insertion device» (FIG. 21.AB), which is removed during the DROID procedure. Both pBXB1 and one of the genetic cargo insertion devices were transformed in the same EC100Dpir+ strain by electroporation. The modified TP114::tetB was then transferred by conjugation at 30° C. into EC100Dpir+ containing pBXB1 and one of the Kill1 or 3 insertion devices. Since the integrase is constitutively expressed, a single subculturing step is enough to promote integration. The resulting plasmid TP114::tetB-Kill1 or 3 was then transferred by conjugation to E. coli MG1655Nx^{R}. Transconjugants bearing both the selection module from the genetic cargo and from TP114::tetB were selected. From this point forward, the strains were cultivated at 37° C. to avoid activation of the thermosensitive origin of replication (oriV_{pSC101ts}) from the integrated genetic cargo that could destabilize TP114. E. coli MG1655Nx^{R}+TP114::tetB-Kill1 or 3 were then transformed with pCP20 by electroporation. pCP20 expresses the FLP recombinase which recognizes both the FRT site in the recombineering cassette and the FRT site in the genetic cargo, and recombines them together to knock out tetB, the attL_{bxb1} site, and the oriV_{pSC101ts} which constitutes the insertion device (FIG. 22.A). Integrity of the inserts was assessed by PCR for TP114, TP114::tetB (FIG. 22.B), TP114::tetB-Kill1 (FIG. 22.C) and TP114::Kill1 (FIG. 22.D) (data not shown for TP114::Kill3). The DROID technique could also rapidly be adapted for several applications such as chromosomal insertion of large constructs and assembly of very large plasmids or exogenous chromosomes.

[0202] Construction of the Cas9 test genetic cargo insertion devices. Two genetic cargos coding for cas9 and gRNA(s) were inserted in the transfer machinery using the DROID method. While assembly of such a large cluster of genes is usually complex and requires multiple steps, the DROID approach considerably simplifies the process. One of the most important aspects of the cas9-gRNA gene cluster is to design highly specific gRNAs. To design such gRNAs, DNA 2.0 (ATUM) web-based software was run with the chloramphenicol acetyl-transferase gene (cat) as the target sequence and E. coli K-12's genome as the off-target sequence. The most potent gRNA spacers (highest AG, lowest off-targets) were then run into BLASTn (Altschul et al., 1990) against Enterobacteriaceae and EcN genomes to eliminate any candidate gRNAs with high off-targeting. This bioinformatic strategy identified three gRNAs (namely gRNA 1, 2 and 3) (FIG. 21.FG). The genetic cargo was introduced into the transfer machinery vector, in a two-step approach. To do so, a first plasmid was created by combining the cas9 gene from pKN02, the kanamycin resistance cassette from pKD4, and the oriV_{pSC101ts} from pGRG36 using corresponding primers (Table 2). gRNA 1 was amplified entirely from a previous construct (pKN02), and the gRNA 2 and 3 spacers were added directly in PCR primers. A first genetic cargo containing the cas9 gene with gRNA 1 (Kill1) was generated. Another genetic cargo encoding the cas9 gene with gRNA 1, 2 and 3 (Kill3) was also obtained. For genetic cargo Kill3, assembly tags were placed between each gRNAs to prevent miss-assembly due to the repetitive nature of the gene locus. Other fragment junctions facilitated the addition of short sequences in the primer tail such as an FRT site, between gRNA 1 and the oriV_{pSC101ts}, and the attP_{bxb1} site, between oriV_{pSC101ts} and cas9. Both genetic cargo insertion devices were constructed by Gibson assembly. All gRNA sequences were confirmed by Sanger sequencing (data not shown). Complete plasmid maps of Kill1 and Kill3 are shown in FIGS. 21.A and 21.B respectively.

[0203] In vitro conjugation assay. In vitro conjugation experiments were performed as described in the example I Material and method section.

[0204] Generation of chloramphenicol resistant Citrobacter rodentium. Details about the use of pGRG36 and Tn7 mediated insertion of DNA is provided in the material and method section of Example I and in FIG. 1. Specifically, integration plasmid pGRG36-SmCm was transformed in C. rodentium DBS100 by electroporation. To mediate cassette insertion into glmS gene's terminator, C. rodentium DBS100 was first cultivated at 30° C. in LB with arabinose until OD₆₀₀ₙₘ 0.6. Then, cells were heat-shocked at 42° C. for 1 hour and incubated at 37° C. overnight to allow for plasmid clearance. Cells were then streaked onto a LB agar plate selecting only the insert. Plasmid curation and insertion of the cassette in the genome was confirmed using the primers oGSC6-F, oGSC6-R, oGSC5-F, opir3-F and opir3-R from Table 2.

[0205] Construction and test of pNA22, pNA23 and pNA24. The pNA22 to 24 plasmid suite was designed to delimit the minimal DNA sequence responsible for the replication of TP114. Replication initiation sequences are usually located near the repA gene previously identified in TP114 as TP114-083 (see Example II) (Praskier et al., 2005). In order to isolate the minimal DNA sequence for replication, repA and a 1,000-bp region located either upstream or downstream of repA, or both, were cloned into pKD3 by Gibson assembly to yield pNA22 to pNA24. Since pKD3's replication is pir-dependent, the constructions were transformed into chemically competent E. coli EC100Dpir+(Metcalf et al., 1994). Then, functionality of the replication origin from TP114 was tested by transformation in E. coli BW25113.

[0206] Generation of pir+EcN (KN05) strain. The pir gene was amplified from EC100Dpir+ and assembled with rrnB terminator from pFG018 and a SmaI+XhoI digested pGRG36 backbone. The resulting plasmid pGRG-pir+ (Kvitko et al., 2012) was then transformed in MFDpir+ (Ferrières et al., 2010) and mobilized towards EcN by RP4 mediated conjugation. To induce pir insertion into glmS gene's terminator, EcN was first cultivated at 30° C. in LB with arabinose until 0.6 OD₆₀₀ₙₘ. Then, cells were heat-shocked at 42° C. for 1 hour and incubated at 37° C. overnight to allow for plasmid clearance. Plasmid curation was tested by streaking 20 colonies on plates with or without ampicillin to select for pGRG36's backbone. The clones for which plasmid curation was confirmed were then screened by PCR for pir insertion using the respective primers presented in Table 2.

[0207] Host constrained replication of the transfer machinery. A cassette coding for cat and oriV_{R6K} was amplified from pKD3 and used to replace TP114-083's CDS (repA) in an E. coli EC100Dpir+ strain. Recombinant clones were screened by PCR using the corresponding primers from Table 2. Replication of the resulting plasmid TP114ΔrepA::cat-oriV_{R6K} should be dependent on a pir gene located in E. coli EC100Dpir+'s chromosome. pir-dependent replication of TP114ΔrepA::cat-oriV_{R6K} was verified by conjugative transfer in pir+ (KN05 and EC100Dpir+) or pir− hosts (KN01).

[0208] In silico oriT_{TP114} prediction. The origin of transfer (ori7) is usually located near the promoter of the nickase in conjugative and mobilizable plasmids. In TP114, a large intergenic region is located near the promoter of nikAB (TP114-041 and TP114-042) that encodes the predicted nickase proteins. In silico analysis of the potential oriT of TP114 (oriT_{TP114}) sequence was first compared to other IncI2 plasmids listed in Table 5 using BLASTn to find highly conserved regions in the potential oriT_{TP114}. This allowed to narrow down oriT_{TP114} to a 138-bp core sequence. This core oriT_{TP114} was then compared to the minimal oriT_{R64} (Furuya and Komano, 2000) by Pairwise Sequence Alignment using EMBOSS Needle web-based software (Rice et al., 2000). The alignment was performed using default settings (a cost of 10 for gaps creation, 0.5 for extension). Results were then manually annotated to indicate the positions of important repeats, and putative binding and nicking sites.

[0209] Construction of pNA01 and derivatives. The whole intergenic region comprising the predicted oriT_{TR114} was amplified, cloned, and assembled with the broad host-range oriV_{pBBR1} from pSIM7, and tetB from pFG018, using Gibson assembly hereby creating pNA01. An alternative plasmid (pNA02) contained a 7-bp deletion centered on the predicted nicking site of oriT_{TP114} sequence and was assembled with the same backbone as pNA01. A kanamycin resistant variant of pNA01 and pNA02 (pKN30 and pKN31 respectively) was generated by amplifying the backbone of pNA01, or pNA02, and by amplifying the kanamycin resistance gene from pKD4. PCR fragments were then purified and assembled together using Gibson assembly.

[0210] Deletion of oriT_{TP114}. An FRT-flanked cat cassette was amplified from pKD3 to delete, by recombineering, a portion of the predicted oriT_{TP114} comprising the nicking site. Deletion clones were verified by PCR and were then used in conjugation experiments to assess the impact of the deletion on transfer frequency.

[0211] Statistical analysis. Statistical significance was performed as described in the material and method section of the Example I.

[0212] 3.0—Conformations of the Conjugative Delivery System

[0213] Variations in the genetic cargo's delivery mode. The genetic cargo nucleic acid molecule can be delivered using different approaches, each with their advantages and potential inconvenients. In this section, COP delivery modes will be explored. First, the COP can be decomposed in several component as shown in FIG. 23.A. The COP is first composed of a probiotic bacterium as well as a conjugative delivery system. The conjugative delivery system is itself composed of the transfer machinery and the genetic cargo which themselves contains functional gene modules. As such, the conjugative delivery system can be decomposed into several vectors and can be partially integrated in the chromosome of the probiotic donor. A first strategy to mobilize the genetic cargo is to insert it into the transfer machinery to form a single vector which can autonomously propagate in a population of bacterial cells. While this method can be desirable for applications where maximal conjugal transfer is required, it can also lead to persistence of the conjugative delivery system in the microbiota. Therefore, alternative methods of propagation that provide a transient expression of the genetic cargo should also be considered. For example, it can be necessary for the genetic cargo to be expressed at different levels through time or for a short period of time (e.g. expression of insulin stimulating peptides like GLP-1). Alternatively, if the genetic cargo mediates a negative effect on a bacterial population, its persistence in the environment could lead to the emergence of resistant bacteria. Examples of such alternative method includes constrained cis mobilization and in trans mobilization which are presented in FIG. 23.B and are discussed in the next sub-sections.

[0214] 3.1—Genetic Cargo Delivery by Cis Mobilization

[0215] Cis mobilization as a potent conjugative delivery system mode. Cis mobilization is a delivery mode in which both the transfer machinery and the genetic cargo are found on the same vector. In this setup, the Conjugative Delivery System is transferred to the recipient bacterium, which in turn becomes a new donor. Through this process, the conjugative delivery system and the genetic cargo are transferred at an exponential rate, since one donor bacterium can create multiple donor cells and trigger a chain reaction. Due to this exponential diffusion, cis mobilization is theoretically the most efficient delivery mode to propagate the genetic cargo within a bacteria population, but it also leads to conjugative delivery system persistence in the environment. One of the main challenges of the cis-mobilization strategy is to link the Transfer machinery and the genetic cargo on a same vector.

[0216] DROID is a potent method for the fusion of DNA molecules. Several methods can be employed to mediate the association of two DNA molecules, for example Gibson assembly, digestion-ligation, Golden Gate, USER-cloning and other derivatives. One alternative is to use recombination-based techniques such as Recombineering, Gene doctoring, or NO-SCAR. However, although those techniques can easily delete large DNA fragments, they are limited by the length of the DNA molecule that can be inserted into a specific location. The DROID method presents several advantages over existing methods as it can be done very quickly and its use of the serine-integrases makes it highly specific to orthogonal insertion sites. DROID allows easy insertion of large DNA molecule that carry complex gene clusters since the fusion of both DNA molecules together is independent of their size. After the fusion of the DNA molecules, undesirable DNA sequences can be easily removed through the action of a second recombinase that excises specific DNA fragments. The DROID method leaves signature scars at either end of the insertion site (one FRT site and one attR_{Bxb1} site) which are not homologous to one another. This prevents recombination between scars that could knock-out the inserted DNA molecule.

[0217] Functional test of the genetic cargo insertion devices. Two genetic cargo insertion devices were constructed to test the DROID method. Since in this example the genetic cargo is composed of a cas9-gRNA complex targeting the cat gene, a regular transformation of Kill1 or Kill3 insertion devices, in a cell containing a plasmid bearing the cat gene (pT) should lead to plasmid loss. Therefore, as a control to validate that the genetic cargos were functional, the genetic cargo insertion devices were first directly transformed in a cell containing the pT plasmid. Transformation efficiency was found to be significantly higher when selecting only for the genetic cargo insertion devices instead of both the insertion device and the pT plasmid simultaneously (FIG. 24). Furthermore, since pT codes for GFP (FIG. 21.F), its presence in the cell produces a fluorescent signal that can easily be visualized under blue light. The CFUs from the transformation of both Kill1 and Kill3 insertion devices were all GFP negative, showing clearance of pT within the transformants. This indicated that both genetic cargos were functional in their insertion devices.

[0218] Insertion of two test genetic cargos in the transfer machinery by DROID. The DROID method can be divided in three simple steps (FIG. 22.A). The first step is to insert the loading dock into the target DNA molecule by recombineering (FIG. 22.B). This step is only required once. The resulting plasmid can then be used to insert several different genetic cargos using the same approach. In the present example, the loading dock is a fragment of pREC1 that encodes for FRT-tetB-attB_{Bxb1} and it was inserted in TP114, replacing the aph-Ill gene and generating TP114::tetB. The second step requires both the genetic cargo insertion device and the plasmid pBXB1 to be cloned in the same cell. Two genetic cargo insertion devices were used to test the DROID method: Kill1 (FIG. 21.A) and Kill3 (FIG. 21.B). TP114::tetB was transferred by conjugation towards E. coli EC100Dpir+ containing pBXB1 and Kill1 or 3. Then, TP114::tetB-Kill1 or 3 (FIG. 22.C) were transferred towards E. coli MG1655Nx^{R}. The last step of the method is to transform E. coli MG1655Nx^{R}+TP114::tetB-Kill1 or 3 with pCP20. This step enables the removal of tetB, attL_{BXb1} and oriV_{pSC101s} (FIG. 22.D). The final conjugative delivery systems, TP114::Kill1 and TP114::Kill3, were transferred into KN01 and KN01ΔdapA. The whole process from step 1 to 3 requires 11 days to complete, but step 1 is not required each time. This thus reduces the time to perform a clean insertion of the genetic cargo to 7 days.

[0219] Cis mobilization of genetic cargos in different cell types. To test whether the genetic cargos were functional after DROID into the transfer machinery (TP114), TP114::Kill1 was used as a model. The conjugative delivery system TP114::Kill1 was transferred into a 1:1 mix of four different recipient cells: KN02, E. coli MG1655Nx^{R}, Enterobacter aerogenes, and Salmonella typhimurium. In this mix, only KN02 is resistant to chloramphenicol and therefore, only KN02 should be targeted by the cas9-gRNA genetic cargo. The efficiency of TP114::Kill1 was evaluated through COP subjected cell survival ratios. These COP-subjected cell survival ratios represent the proportion of cells that received the conjugation delivery system and survived. The COP-subjected cell survival ratios were calculated by dividing the conjugation efficiency of the TP114::Kill1 (cells that survived the conjugative delivery system) by the conjugation efficiency of TP114 (total cells that should have received a conjugative delivery system). As expected, only KN02 was eliminated by the conjugative delivery system (FIG. 25.A). To confirm that the killing was not due to off-targeting in KN02's genome, a second mix of four recipients was prepared (Citrobacter rodentium KN04, E. coli MG1655Nx^{R}, KN03, Salmonella typhimurium). In this mix, only C. rodentium KN04 is resistant to chloramphenicol due to an insertion of the cat gene in its chromosome. The COP subjected cell survival ratios was again used to assess TP114::Kill1's efficiency. As predicted, only C. rodentium KN04 was affected by the COP system, thereby showing the cas9-gRNA genetic cargo could be expressed in different cells and was highly specific to the cat gene (FIG. 25.B).

[0220] The DROID method successfully fused the transfer machinery and the genetic cargo in a single vector. In the present example, it was shown that the DROID method could be used to join the transfer machinery with the genetic cargo in three steps. These steps were designed to avoid functional redundancy between the genetic cargo and the transfer machinery. The FRT recombination step was needed to eliminate the selection module from the transfer machinery and the maintenance module from the genetic cargo thereby creating a single DNA molecule with a single selection and vegetative replication module. The present conjugative delivery system was then used in a proof of concept of genetic cargo delivery towards several representatives of Enterobacteriaceae, a taxonomic group of bacteria that often are the cause of antibiotics resistant enteric and urinary infections.

[0221] 3.2—Genetic Cargo Delivery by Constrained Cis-Mobilization

[0222] Constrained cis-mobilization as a biosafety measure. A constrained cis-mobilization system consists of a conjugative delivery system in which the genetic cargo and transfer machinery are located on the same DNA molecule. However, in such a system, the essential replication initiation gene from the maintenance module is inserted in the chromosome of the donor strain (FIG. 23.B). This makes replication of the conjugative delivery system dependent on the COP chromosome. Such a system would still be able to propagate at an exponential rate since the recipient strain would be able to express the genes from the conjugative delivery system. However, the conjugative delivery system will eventually be lost since the system cannot replicate in the recipient bacteria. Therefore, while the system exhibits high conjugative efficiency, it would not persist in the environment, thereby allowing for better control over administration dynamics and better biosafety level.

[0223] Localization of oriV_{TP114}. The first step toward constrained replication is to confirm the localization of the origin of replication of TP114 (oriV_{TP114}) since constrained cis-mobilization requires to relocate repA to the donor cell chromosome. Conjugative plasmid replication is usually initiated by a plasmid-encoded protein called RepA. This protein recruits the DNA replication machinery from the host cell and allows for the replication of plasmid DNA. The replication initiation protein encoded by TP114 was predicted by in silico analysis to be encoded by the repA gene TP114-083 (see example II). In most conjugative plasmids, the oriV can be found in an intergenic region near the repA gene. However, in TP114, repA is flanked by two intergenic regions. It was unclear as to which one is oriV_{TP114}. Consequently, repA was cloned with either 1,000-bp upstream, downstream or 1,000-bp on both sides of the gene into a plasmid backbone. The plasmid backbone contains oriV_{R6K}, an origin of replication that is dependent on a chromosomally integrated pir gene. Assemblies were first verified in a pir+ strain E. coli EC100Dpir+ and then cloned in a pir− strain BW25113 for oriV_{TP114} functionality analysis (FIG. 26). From the three plasmids tested, only one could replicate in a pir-host. This plasmid contained repA and 1,000 bp on both sides of the gene. This result indicated that TP114-083 encoded the actual RepA protein and that oriV_{TP114} is located near the repA gene.

[0224] Constrained cis mobilization of TP114. Constrained cis-mobilization refers to a conjugative delivery system in which the transfer machinery and the genetic cargo are located on a same vector that replicates under the control of a chromosomally encoded replication protein. In order to develop constrained cis-mobilization, a characterization of the replication protein and its associated oriV is required. While oriV_{TP114} and its repA gene were localized, several other factors have to be taken in consideration for the selection of the replication protein and oriV pair. For instance, the replication protein must be rarely found in the chromosome of potential recipient cells to avoid maintenance of the conjugative delivery system in the environment. Also, to reduce incompatibility based rejection of the conjugative delivery system, it can be desirable to use a replication system heterologous to the one of TP114. One of the most studied and understood replication system is R6K's pir-dependent oriV_{R6K}. The Pi protein, encoded by the pir gene, is naturally found in conjugative plasmids from the IncX family and present the advantage of not being found frequently in bacterial chromosomes. A pir integration system based on the Tn7 integration plasmid pGRG36 was developed and a pir+ EcN strain KN05 was generated. The TP114-083 (repA) was replaced by the oriV_{R6K} and a chloramphenicol resistance cassette (cat) using the commercially available E. coli EC100Dpir+ cloning strain generating TP114ΔrepA::cat-oriV_{R6K}. This plasmid was then transferred into KN05 and KN01 to evaluate the capacity of TP114ΔrepA::cat-oriV_{R6K} to replicate in a pir+ and pir− strain respectively. The conjugation efficiency was compared to wild-type TP114 under the same condition (FIG. 27.A). As expected, no transconjugants could be retrieved from the transfer of TP114ΔrepA::cat-oriV_{R6K} towards KN01 (pir− strain), but transconjugants were obtained for the conjugation towards KN05 (pir+strain). However, the conjugation efficiency of TP114ΔrepA::cat-oriV_{R6K} was lower than that of wild type TP114. A second conjugation experiment was attempted, this time using KN05 as the donor strain and E. coli EC100Dpir+ as the recipient (FIG. 27.B). The conjugation efficiency of both plasmids was then equivalent, thereby showing in this case that constrained cis-mobilization had very little impact on conjugation efficiency. Using such maintenance module, plasmid transfer towards pir− strain should remain unaffected, but replication should be impossible in the recipient cell. This means that expression of the genetic cargo's payload and the transfer machinery can still be achieved in pir− strains, but this expression is transient. Such transitory expression is desirable in several situations where constant expression can be detrimental to the COP effect, to the environment, or to the subject. Constrained cis-mobilization is therefore an efficient way to prevent plasmid persistence while still maintaining high conjugation efficiency.

[0225] 3.3—Genetic Cargo Delivery by in Trans Mobilization

[0226] In trans mobilization as a delivery mode for the Genetic Cargo. In trans mobilization is achieved by using a vector system in which the transfer machinery and the genetic cargo are present on two different DNA molecules (FIG. 23.B). In this conformation, the genetic cargo must contain a transport module that is compatible with the transfer machinery's vegetative replication module. The transfer machinery can be immobilized either by insertion in the chromosome or disruption of its own transport module (oriT). This mode of delivery therefore allows the genetic cargo to be mobilized in trans (on a different DNA molecule independent from the transfer machinery) towards a recipient bacterium. The choice of vegetative replication module for the genetic cargo can have great importance over its persistence in the environment. This mode of delivery allows for maximal biocontainment, but more modest transfer efficiency as recipient bacteria cannot propagate the genetic cargo.

[0227] Localization of TP114's origin of transfer (ori7). All mobilizable plasmids are dependent over the recognition of their oriT by a relaxosome to enable the conjugation process to occur. The relaxosome is a multi-heteromeric protein complex that recognizes and binds to specific sequences on the oriT and cleaves a single strand of DNA at a specific location named the nicking site. The single strand of DNA is then guided to the T4SS, and transferred through the T4SS to the recipient cell. Mobilizable plasmids that do not encode a T4SS can use the T4SS encoded by another conjugative plasmid. However, mobilizable plasmids often encode their own relaxosome which are specific to their own oriT sequence. The oriT is therefore one of the most important sequence for genetic cargo transfer by the transfer machinery. Previous examples presented here exploited a physical link between the genetic cargo and the transfer machinery to use the oriT sequence from the transfer machinery in cis for DNA transfer. However, as observed with mobilizable plasmids, it is possible to relocate the oriT sequence from the transfer machinery to the genetic cargo nucleic acid molecule to only mobilize, in trans, the genetic cargo to the recipient cell. Importantly, oriT_{TP114} first needed to be identified. Based on other conjugative plasmids topology, the oriT sequence is often located near the nickase gene, a subunit of the relaxosome. On TP114, the nickase is predicted to be TP114-041 (nikB), a core gene that shares the same protein family pfam03432 domain as previously identified nickases. In TP114, a 368-bp intergenic region with two diverging genes is located near the promoter region of nikB and represented a potential oriT.

[0228] Construction of in trans-mobilizable vectors pNA01. The 368 bp predicted oriT_{TP114} was cloned into a broad-host-range plasmid backbone containing a vegetative replication module (oriV_{pBBR1}) and a payload module (tetM). Genetic cargo pNA01 was transformed in KN01ΔdapA containing TP114 and then mobilized towards KN02 (FIG. 28.A). Conjugation efficiency of pNA01 was comparable to that of TP114, confirming that the 368 bp DNA sequence cloned into pNA01 is oriT_{TP114}.

[0229] Identification of TP114's nicking site. In trans mobilization efficiency could be slightly perfected by immobilization of TP114, either by the deletion of the oriT or by integration in the donor's chromosome. Immobilization of the transfer machinery would prevent its spreading in target bacteria allowing for better biosafety by limiting the persistence of the transfer machinery in the environment. Also, an immobilized transfer machinery can still mobilize the genetic cargo in trans which allows the transfer of only the genes that need to be expressed in the recipients. However, oriT_{TP114} is located in an intergenic region between two diverging genes. This means that this region contains two unannotated promoters, one of which is responsible for the expression of the essential nickase gene nikB. Precise deletion is therefore required to avoid possible impairment of nikB expression of. Sequence comparison of oriT_{TP114} with other plasmids from the IncI2 family (Table 5) provided further information over sequence conservation. Among the tested plasmids, pChi7122-3 only showed homology for the first 138 bp of oriT_{TP114} sequence. It is therefore most likely that both the nikB promoter, and the nicking site, could be located in this portion of oriT_{TP114}. Bacterial promoters are usually composed of a −10 and −35 box and can optionally contain operator sequences. As nikB is located upstream of oriT_{TP114} and since a −10 box motif was found at position 13, the promoter of nikB is most likely located in the first 100 bp of oriT_{TP114}. In the IncI1 model plasmid R64, the core oriT_{R64} sequence was determined to be 92-bp long and the nicking site is located at position 77 at a highly conserved guanine. A Pairwise Sequence Alignment performed using EMBOSS Needle software (Rice et al., 2000) revealed 36% homology between the 138 first base pair of oriT_{TP114} and the minimal oriT_{R64} (FIG. 29). This alignment shows that important repeats, and NikA's binding site, were relatively well conserved between R64 and TP114. Using the position of these motifs in TP114, the nicking site was predicted to be G at position 124. To validate that the nicking site really was located at position 124, a 7-bp deletion from position 121 to 127 was performed, then cloned into a second vector, namely pNA02. Genetic cargo pNA02 is identical to pNA01 except for the 7-bp deletion and should therefore not be mobilized by TP114. In trans-mobilization of pNA02 was tested from KN01 containing TP114 to KN02 exactly as performed for pNA01. However, in trans mobilization was virtually abolished by the 7-bp deletion in pNA02's oriT_{TP114} (FIG. 28.B). This indicates that TP114's nicking site is located in this region.

[0230] Deletion of oriT_{TP114} from the transfer machinery of TP114. As discussed above, the mutation of the oriT can be performed to immobilize a conjugative plasmid in a donor strain. In trans mobilization can benefit from this immobilization, otherwise, the transfer machinery and the genetic cargo will compete for transfer through the T4SS. The immobilization of TP114 was performed by recombineering-mediated insertion of a FRT flanked cat cassette creating a 138-bp deletion in oriT_{TP114} spanning position 116 to 254. This deletion covers the nicking site and should prevent the recognition of oriT_{TP114}, and hence the transfer machinery conjugation, while at the same time leaving the expression of nikB unaffected. TP114ΔoriT::cat-tetB was generated in MG1655Nx^{R} and transferred in KN01 by conjugation. Conjugation efficiency of TP114ΔoriT::cat-tetB was greatly impaired, but still yielded a few transconjugants (FIG. 30.A). Such transfer allowed exclusion mechanisms to isolate the TP114ΔoriT::cat-tetB from TP114 which could potentially still be present in the MG1655Nx^{R} strain. Therefore, a second test of conjugation efficiency was performed from KN01 towards MG1655Rf^{R}. This time, no transconjugants could be retrieved thereby showing the complete abolition of TP114's transfer capabilities (FIG. 30.B). Then, a kanamycin resistant derivative of pNA01 and pNA02, pKN30 and pKN31 respectively, were transformed into KN01+TP114ΔoriT::cat-tetB. Using the biocontained transfer machinery, pKN30, and pKN31 were mobilized in trans towards MG1655Nx^{R} (FIG. 31). Only pKN30 was able to transfer to MG1655Nx^{R}, thereby confirming that this confinement method is highly stringent. However, its conjugation efficiency was about 10-fold lower than TP114's. This could be further improved by relocating the relaxosome-associated genes from the transfer machinery to the genetic cargo vector. In summary, in trans mobilization, as demonstrated in the present example, required the relaxosome to be expressed from the transfer machinery (TP114). The relaxosome then recognized oriT_{TP114} on pNA01 and mediated its mobilization through the T4SS. However, the 7-bp deletion of the nicking site in pNA02 prevented the recognition and processing of oriT_{TP114} by the relaxosome thus impairing pNA02 transfer (FIG. 32).

### EXAMPLE IV—GENETIC CARGO DELIVERY AND APPLICATIONS

[0231] Strains, plasmids and growth conditions. All strains and plasmid used in this study are described in Table 1. All plasmid sequences are provided in the sequence appendix. Details about strains, plasmids, growth conditions, in vitro conjugation, feces and tissue processing, in vivo conjugation and statistical analysis are provided in the Material and Method section of the Example I.

[0232] Fluorescence measurements. To assess the efficacy of the gRNA-cas9 payloads at cutting a specific chromosomal DNA sequence, or a plasmidic DNA sequence, two types of bacterial targets were used. The first one, KN02, possesses a gene coding for a green fluorescent protein (Shaner et al., 2013) (NeonGreen™) integrated within its genome. The second one, KN03, carries a pT plasmid bearing a chloramphenicol resistance gene and a gfp gene (Ormö et al., 1996). Fluorescence was used as a proxy to measure the integrity of the bacterial genome of KN02 or of plasmid pT in KN03. Briefly, as long as the pT plasmid carrying the chloramphenicol resistance gene is devoid of any cut, it can be maintained in the bacterial host and GFP is expressed. As soon as the CRISPR-Cas9 system cuts the chloramphenicol resistance gene, pT is lost, thereby leading to loss of GFP fluorescence. To determine the efficiency of the COP system to cure pT, the number of green fluorescent and non-fluorescent colonies were counted on recipient and transconjugants selecting plates. Fluorescence was measured using a Typhoon FLA 9500 and images were analyzed using ImageFiji software.

[0233] Cell fluorescence induction. To limit possible negative effects of high levels fluorescent proteins on the fitness of the target bacteria, the genes coding for the fluorescent proteins were under the control of inducible promoters. In both genomic and plasmidic targets the fluorescent signal was inducible. The gfp gene from pT is under the repression of AraC, a protein which action is inhibited by arabinose (Guzman et al., 1995). gfp on pT is therefore inducible in the presence of 1% arabinose. In the case of the KN02 cells (chromosomal target), fluorescence is mediated by NeonGreen. E. coli KN02's NeonGreen gene is inducible with 1 mM IPTG (Lutz et al., 1997). NeonGreen emits green fluorescence with similar absorption and emission spectrum to GFP, but with brighter fluorescence (Shaner et al., 2013). Both plasmidic and genomic targets were confirmed for fluorescence emission under a transilluminator using blue light and in a cell sorter (FACSJazz) (data not shown).

[0234] Colony photography. To follow pT loss during both in vitro and in vivo experiments, colony fluorescence was detected using a Typhoon FLA 9500 on LB agar plates supplemented with 1% arabinose. To do so, two images were taken; one for the detection of GFP used a Low Pass Blue filter and a 473 nm laser, the other one for the BrightField image used a Low Pass Red filter and a 635 nm laser. Those two images were merged using ImageFiji software (Schindelin et al., 2012). Then, the green fluorescent and non-fluorescent colonies were manually counted.

[0235] Mortality rate evaluation by FACS. For in vitro experiments where the target was genomic, the mortality rate was investigated using a live/dead approach. Live and dead bacteria were discriminated using propidium iodide (PI) staining. Typically, PI is used to detect dead cells since it can only penetrate through compromised membranes (Davey, 2011). KN02's fluorescence was induced throughout the in vitro COP treatment. To detect dead cells, cells were stained with 30 μM PI in NaCl 0.85% for 15 minutes in the dark. Then, cells were washed twice and resuspended in NaCl 0.85% at a density allowing for rapid and accurate cell detection. Green and red fluorescence was immediately evaluated on 100 000 cells per sample using a FACSJazz cytometer.

[0236] 4.1—In Vivo Use of the COP System to Transfer a Payload with Beneficial Effects on the Recipient Bacterium

[0237] The COP system can be used to deliver a genetic cargo beneficial to a target bacterium. Such a genetic cargo could encode genes that provide an advantageous phenotype to the recipient bacteria. Providing a phenotypic advantage to certain bacterial species could help rebalance a disturbed microbiota by helping under-represented species to proliferate. For example, this could be achieved by transferring genes allowing the use of a new carbon source, such as lactose. Providing lactose degradation enzymes would benefit the bacteria, but also the subject if lactose intolerant. Another example of beneficial genes that could be contained in the payload would be antibiotics resistance genes. Providing that certain bacteria needs to be enriched in a certain microbiota, transferring a resistance gene to these bacteria before antibiotics treatment would greatly enrich their population.

[0238] The COP system can transfer a payload providing beneficial phenotypic traits to target bacteria in vivo. The COP was tested for its ability to transfer a genetic cargo providing a beneficial phenotypic trait to target bacteria, and this, in the gut environment. To do so, the in vivo conjugation mouse model was used with KN01+TP114 as a donor to provide the kanamycin resistance gene to the KN02 recipient bacteria. The COP achieved high level of genetic cargo transfer within the first two days of the experiment as KN02 bacteria became resistant to kanamycin (FIG. 33.A). The results obtained were consistent between the caecum and feces (FIG. 33.B). Most of the recipient population gained the ability to resist kanamycin throughout the experiment, hereby showing that the COP could be used to transfer and deliver beneficial phenotypic traits to bacteria in vivo.

[0239] 4.2—In Vivo Use of the COP to Transfer a Payload Detrimental for the Recipient Bacterium

[0240] The COP system can be used to deliver the CRISPR-Cas9 system as a payload in vivo. In this example, the COP is used in the gut environment to deliver the CRISPR-cas9 system to inactivate specific genes into target bacteria. For this demonstration, the COP was composed of the probiotic EcN, (FIG. 34.A) with a conjugative delivery system having the transfer machinery and the genetic cargo located on the same vector (see cis mobilization in example III) (FIG. 34.B). In this configuration, because the transfer machinery and the genetic cargo are linked together, they are both transferred into the target bacterium which becomes a donor contributing to the exponential spreading of the cargo within the local microbiota. Once in a target recipient cell, the Cas9-gRNA payload is expressed and scans the genome for the specific target sequence determined by the tunable gRNA spacer's sequence. When a target sequence is detected, Cas9 catalyzes a double-stranded break into the cell's DNA (FIG. 34.C). The construction of the conjugative delivery system is detailed in example 3.1. Briefly, the genetic cargo and transfer machinery were linked together using the DROID method. The genetic cargo's payload was composed of the cas9 gene and one (Kill1) or three (Kill3) gRNAs. For this proof of concept, the gRNAs from the genetic cargos were designed to bind specifically to the chloramphenicol resistance gene (cat). The cat target sequence can be naturally found on a plasmid or on the chromosome of target bacteria. When cat is located on the chromosome of the target strain, the target cells were killed as a consequence of the double-strand breaks caused by CRISPR-cas9. On the other hand, when cat is located on a plasmid, the double-strand breaks induced by CRISPR-cas9 promoted the degradation of the plasmid and the cells were “disarmed” (FIG. 34.D).

[0241] 4.2.1—In Vivo Use of the COP to Deliver a Payload that Sensitizes Bacteria to Antibiotics.

[0242] The COP can be used to deliver a payload that eliminates a phenotypic trait in target bacteria. One way the COPs can have a detrimental effect mediated by the transfer of its genetic cargo is by hindering the capacity of the target bacteria to express a given phenotype. One of the most infamous phenotype is the resistance to antibiotics. It could therefore be desirable to design a COP that induces the loss of antibiotic resistance genes in a bacterial population. The use of programmable endonuclease (e. g. cas9) holds great promise for the targeting and elimination of antibiotic resistance genes responsible for the emergence of extremely resistant pathogenic bacteria. Antibiotic resistance genes can be found on both bacterial chromosomes and plasmids. When those genes are located on a horizontally transferable genetic element, like conjugative and mobilizable plasmids, they are more problematic. In this particular scenario, the resistance phenotype is transferable to other species of bacteria. The use of the COP bearing CRISPR-Cas9 allows the targeting of these resistance genes and the disarmament of bacteria bearing such mobile genetic elements in vivo.

[0243] The COP can deliver a payload that cures antibiotic resistance plasmids in vivo. The COP was used during an in vivo conjugation experiment to test whether it could deliver a payload in order to eliminate antibiotic resistance plasmids from target bacteria. To do so, the COP was tested for its ability to deliver a payload capable of eliminating pT from a commensal E. coli strain in the murine intestinal tract. KN03 bearing pT was introduced in mice 12 hours prior to KN01 bearing TP114 or KN01 bearing TP114::Kill1. The presence of pT in the recipient cells was monitored by fluorescence on selective LB plates. A single administration of the COP system could clear as much as 73% of the target plasmid throughout the four days of the experiment (FIGS. 35.A and B). No plasmid loss was observed in the control group (KN01+TP114) and all transconjugants of the COP system were devoid of the target plasmid (FIG. 35.C). Results from feces samples were consistent with frequencies found in the caecum of the mice at the end of the experiment (FIG. 35.D). These results indicated that it was possible to specifically cure a resistance plasmid from a cell in vivo in the gut microbiota using the COP system to deliver a payload containing the CRISPR-cas9, hereby causing the loss of antibiotic resistance phenotype.

[0244] 42.2—In Vivo Use of the COP System to Deliver a Payload in Order to Selectively Kill Bacteria.

[0245] The COP system can be used as an alternative to conventional antibiotic drugs. The use of CRISPR-Cas9 to target and eliminate specific bacteria in a mixed community is an application of great interest since the emergence of antibiotic resistance threatens our ability to treat bacterial infections. Using TP114::Kill1, the COP can target chromosomal sequences into pathogenic bacteria's genomes to eliminate them. Since most bacteria are unable to perform Non-Homologous End Joining (NHEJ), a Cas9 mediated blunt double-stranded cut in their chromosome can result in death. In this in vivo example, a specific strain of bacteria is successfully targeted and eliminated from the community without affecting other closely related strains. To test the ability of the COP to deliver a payload to eliminate specific bacteria from a complex bacterial community, a set of closely related target and non-target strains was required. For these experiments, KN01ΔdapA was used as the donor strain, KN02, which carries a targeted chromosomal cat gene was used as the target strain, whereas KN03, which carries a chromosomal tetB gene instead of cat was used as the non-target strain.

[0246] 4.2.2.1—Prophylactic Use of the COP System to Selectively Kill Bacteria In Vivo.

[0247] Applications of prophylactic use for the COP TP114::Kill1 system. The prophylactic treatment implies a daily uptake of the COP to avoid infections or the spreading of unwanted bacterial strain. This type of treatment could be useful in situations where a subject is susceptible to be exposed to a certain type of bacterial infection, e.g. when traveling, or while recovering from an antibiotic treatment. Prophylactic use of COPs could also improve health by targeting antibiotic resistant bacteria thereby lowering the chances of antibiotic resistant infections. A mouse model for the investigation of such prophylactic treatment was designed. Mice were first fed with the COP system bearing TP114::Kill1 or TP114 (as a control), and then were subjected 12 hours later to a 1:1 mix of target and non-target bacteria (respectively KN02 and KN03). The respective abundance of the target and the non-target bacteria was then followed over four days in feces (FIG. 36.A).

[0248] The COP system can be administered prophylactically to deliver a payload that specifically eliminates an invading target bacterium in vivo. The murine prophylactic treatment was followed strictly using COP KN01+TP114::Kill1 or KN01+TP114 (control placebo treatment). The COP prophylactic treatment resulted in as much as 13-fold specific decrease of target strain's abundance as compared with the non-target strain, and this, in a single day. A clear drop in raw CFUs count of the target strain was observed with only a single dose of COP KN01 bearing TP114::Kill1 prophylactic treatment (compare FIGS. 36.B and 36.D). A competitive ratio was calculated between the target strain and the non-target strain by comparing the CFU count between the two strains. For example, the target strain competitive ratio was calculated by dividing the CFU count of the target strain by that of the total recipient strains CFU. The equivalent was done to calculate the non-target strain competitive ratio. Competitive ratio compares the fitness of the two strains to highlight the impact of the COP system. The strain competitive ratios were consistent with raw CFUs with a clear difference between the recipient strains at days 2, 3 and 4 for the COP KN01 bearing TP114::Kill1 treatment, but not the control (compare FIGS. 36.C and 36.E). The difference in strain colonization suggests that the COP technology can efficiently and specifically eliminate the target strain in vivo, allowing the non-target strain to thrive. This showed that the COP system could be used prophylactically to deliver a payload in vivo in order to specifically prevent pathogenic bacteria to invade the gut microbiome.

[0249] 4.2.2.2—Therapeutic Use of the COP System to Selectively Kill Bacteria In Vivo.

[0250] Examples of therapeutic uses for the COP in vivo. The therapeutic use of the COP implies that the administration of COP occurs after the detection of a given pathogenic bacteria. The COP is administered to eliminate or inactivate the pathogenic bacteria. This type of treatment could be useful in situations where it is preferable to induce mortality in specific pathogen cells. In fact, the high specificity of the COP system would prevent the establishment of opportunist pathogens and would limit the apparition of pathologies such as antibiotic-associated diarrhea. Furthermore, treatment of a subject could be preferable in situations where the target bacteria are resistant to all known antibiotics. Nonetheless, high specificity of the COP could allow precise engineering of the gut microbiota in dysbiosis-affected subjects by efficiently targeting over-represented species in an individual. A mouse model for the investigation of the efficacy of such therapeutic treatment was devised. The mice were first fed with a 1:1 mix of target and non-target bacteria (respectively KN02 and KN03) and 12 hours later, were treated with the COP containing either the TP114::Kill1 system or TP114 (control). The abundance of target and non-target bacteria was followed in feces over four days (FIG. 37.A).

[0251] The COPs can deliver a payload to eliminate a target bacterium in vivo. The murine therapeutic treatment was followed strictly using COP KN01 bearing TP114::Kill1 or KN01 bearing TP114 (control placebo treatment). A single dose of COP therapeutic treatment yielded outstanding results with as much as 2,116-fold diminution of target strain as compared with the non-target strain within just two days. Significant diminution in raw CFUs was observed on days 2, 3 and 4 with COP KN01 bearing TP114::Kill1-treated mice but not with placebo-treated mice (compare FIGS. 37.B and 37.D). Target and non-target competitive indexes (as calculated in the prophylactic treatment section) showed clear dominance of the non-target strain for COP KN01 bearing TP114::Kill1 treated mice, but not for the control group (compare FIGS. 37.C and 37.E). This showed that the COP technology could be used therapeutically to deliver a payload specifically designed to eliminate a bacterium in vivo.

[0252] 4.3—In Vivo Use of the COP System for the Transfer of a Payload with Mixed Effects on Bacterial Populations

[0253] Utilization of a payload with beneficial and detrimental effects on the recipient bacteria. Using TP114::Kill3 delivery system, it is possible to exploit the transfer of both beneficial gene (kanamycin resistance) and detrimental gene (Cas9-gRNA) in a same genetic cargo to manipulate a population of bacteria. For instance, by transferring the kanamycin resistance gene of TP114::Kill3 into target bacteria and exposing those cells to kanamycin, a selective pressure towards the acquisition of the genetic cargo occurs, hereby forcing the recipient bacteria to be subjected to the effects of CRISPR-Cas9. The plasmid pT that contains the target gene cat and expresses GFP was used to demonstrate this approach (FIG. 21.E). Since TP114 transfers at frequencies around 1% on solid medium in vitro, CRISPR-Cas9 can potentially mediate plasmid loss in about 1% of the population without antibiotic selection. TP114::Kill3 transfer was measured towards KN03 containing pT by selecting either TP114:Kill3 only or both TP114::Kill3 and pT. As a control, TP114 was transferred to KN03 bearing pT to verify that any plasmid curation was not resulting from plasmid incompatibility (FIG. 38.A). The transfer frequency was found to be significantly lower when selecting for both plasmids only with TP114::Kill3 but not with TP114, thereby suggesting that plasmid curation is due to the gRNA-Cas9 system present on TP114::Kill3. Using GFP signals, it was possible to determine the number of recipient bacteria cured of pT following the COP treatment with TP114::Kill3. This number varied between 1 and 7% in the absence of selection. However, in the presence of kanamycin to select for TP114::Kill3 in the recipient cells, plasmid curation reached 100% (FIGS. 38.B and 38.C). pT loss was also confirmed by subculturing 63 transconjugant colonies on selective antibiotics media (21 for TP114 and 42 for TP114::Kill3). Only transconjugants from TP114::Kill3 were successfully confirmed for pT loss (42/42). Conjugation of TP114 WT plasmid into a KN03 bearing pT strain did not lead to pT loss in transconjugants, showing that plasmid loss was due to the expression of the genetic cargo and not plasmid incompatibility. Using this strategy, the efficiency of the system could be enhanced from ˜1% to 100% in vitro. This type of strategy could be scaled up to use several gRNA that targets several resistance genes at a time. This would allow the system to eliminate several antibiotics resistance genes while spreading only one resistance.

[0254] It is therefore expected that in some embodiments, it could be desirable to spread a resistance gene and to couple the COP with an antibiotic treatment.

[0255] 4.4—COP can Deliver a Payload Across Species

[0256] COP can deliver a phenotypic trait as a payload across species. The ability of the COP to transfer a beneficial trait to other species of bacteria was first tested by conjugation between E. coli KN01ΔdapA bearing TP114 as the COP and diverse bacterial species as individual recipients. The recipient bacteria (Salmonella enterica substr. Typhimurium SR-11, E. coli MG1655Nx^{R}, Citrobacter rodentium DBS100, Enterobacter aerogenes ATCC 35029, Klebsiella pneumoniae ATCC 13883, E. coli KN02) were chosen as part of the Enterobacteriaceae family, a family of bacteria most frequently found in the gut microbiome. The process was repeated with alternative transfer machinery (conjugative plasmids pVCR94, RK24, pOX38, R6K, R388) under solid and liquid mating conditions (FIGS. 39.A and 39.B). Most of the transfer machineries were able to transfer the antibiotic resistance across species, highlighting the broad host range of these genetic constructs. The transfer frequency of the payload varied between recipients, but all recipient bacteria could successfully acquire the phenotypic trait.

[0257] Compatibility in Restriction-Modification (RM) systems benefits Horizontal Gene Transfer (HGT). The discrepancy between transfer frequencies was next investigated. One of the major barriers to HGT is the compatibility of restriction-modification systems. As such, the stability of the transferred genetic cargo depends on the ability of the recipient bacteria to target and eliminate the genetic construct. The targeting of a new DNA molecule often relies on RM system, in which DNA molecules are specifically modified to avoid recognition by specific nucleases. As such, compatibility between the probiotic donor's modification system and the recipient's restriction system can influence the recognition rate of the genetic cargo by specific nucleases. It was noted that the transfer of DNA by conjugation seemed limited from E. coli MG1655Nx^{R} to EcN and from EcN to MG1655Nx^{R}, but not between two MG1655 or EcN strains for most tested conjugative systems (FIG. 40). This result suggested that MG1655's modification system was not compatible with EcN's restriction system and vice versa. Therefore, choosing a donor bacterium that has compatible modification systems with the recipient bacteria or engineering one can enhance the payload's stability in the recipient bacteria. Alternatively, a gene encoding an anti-restriction protein can be added to the genetic cargo to enhance its transmissibility between incompatible bacteria. One of such anti-restriction gene is found on RK24 (kclA), thereby explaining the absence of drop for conjugation from MG1655 to EcN. The anti-restriction system of RK24 allowed generally better transfer frequency of its antibiotic resistance gene across several species (FIG. 39.A). Therefore, adding an anti-restriction protein to the COP system could be desirable to improve the delivery of cargos across species.

[0258] Conjugative plasmids are isolated genetic constructs that functions mostly independently from the donor strain. Since conjugative plasmids can spread across several genera of bacteria, their independence from the host chromosome to achieve DNA transfer is important for their persistence through time. While the cell provides resources to a conjugative plasmid, such a plasmid is often auto-regulated and expresses most of the proteins necessary for its adequate functioning. As such, conjugative plasmid's efficiency to transfer should not be affected significantly by the host bacterium. To test this hypothesis, two distantly related E. coli strains MG1655Nx^{R} and E. coli KN01 were chosen to compare conjugation efficiency within the strains. The results from FIG. 40 suggested that the conjugation efficiency was not dependent on the donor strain but is rather the same in both tested strains. The transfer efficiency of all tested conjugative plasmids was the same in both E. coli donor strain, even though those two strains are distantly related. Therefore, the COP system could be easily adapted to operate in a plethora of probiotic hosts.

### REFERENCES

[0259] Alikhan N F, Petty N K, Ben Zakour N L, Beatson S A. BLAST Ring Image Generator (BRIG): simple prokaryote genome comparisons. BMC Genomics. 2011 Aug. 8; 12:402. doi: 10.1186/1471-2164-12-402. PubMed PMID: 21824423.
[0260] Allard N, Garneau D, Poulin-Laprade D, Burrus V, Brzezinski R, Roy S. A diaminopimelic acid auxotrophic Escherichia coli donor provides improved counterselection following intergeneric conjugation with actinomycetes. Can J Microbiol. 2015 August; 61(8):565-74. doi: 10.1139/cjm-2015-0041. Epub 2015 Jun. 3. PubMed PMID: 26166710.
[0261] Altschul S F, Gish W, Miller W, Myers E W, Lipman D J. Basic local alignment search tool. J Mol Biol. 1990 Oct. 5; 215(3):403-10. PubMed PMID: 2231712.
[0262] Andrew S. (2010). FastQC: a quality control tool for high throughput sequence data. Available online at: http://www.bioinformatics.babraham.ac.uk/projects/fastqc/
[0263] Aziz R K, Bartels D, Best A A, DeJongh M, Disz T, Edwards R A, Formsma K, Gerdes S, Glass E M, Kubal M, Meyer F, Olsen G J, Olson R, Osterman A L, Overbeek R A, McNeil L K, Paarmann D, Paczian T, Parrello B, Pusch G D, Reich C, Stevens R, Vassieva O, Vonstein V, Wilke A, Zagnitko O. The RAST Server: rapid annotation using subsystems technology. BMC Genomics. 2008 Feb. 8; 9:75. doi: 10.1186/1471-2164-9-75. PubMed PMID: 18261238.
[0264] Born T L, Blanchard J S. Structure/function studies on enzymes in the diaminopimelate pathway of bacterial cell wall biosynthesis. Curr Opin Chem Biol. 1999 October; 3(5):607-13. Review. PubMed PMID: 10508663.
[0265] Benjamin W H Jr, Turnbough C L Jr, Posey B S, Briles D E. Salmonella typhimurium virulence genes necessary to exploit the Itys/s genotype of the mouse. Infect Immun. 1986 March; 51(3):872-8. PubMed PMID: 3512437.
[0266] Bolger A M, Lohse M, Usadel B. Trimmomatic: a flexible trimmer for Illumina sequence data. Bioinformatics. 2014 Aug. 1; 30(15):2114-20. doi: 10.1093/bioinformatics/btu170. Epub 2014 Apr. 1. PubMed PMID: 24695404.
[0267] Bradley D E. Characteristics and function of thick and thin conjugative pili determined by transfer-derepressed plasmids of incompatibility groups 11, 12, 15, B, K and Z. J Gen Microbiol. 1984 June; 130(6):1489-502.
[0268] Bradley D E, Taylor D E, Cohen D R. Specification of surface mating systems among conjugative drug resistance plasmids in Escherichia coli K-12. J Bacteriol. 1980 September; 143(3):1466-70. PubMed PMID: 6106013.
[0269] Carraro N, Matteau D, Luo P, Rodrigue S, Burrus V. The master activator of IncA/C conjugative plasmids stimulates genomic islands and multidrug resistance dissemination. PLoS Genet. 2014 Oct. 23; 10(10):e1004714. doi: 10.1371/journal.pgen.1004714. eCollection 2014 October PubMed PMID: 25340549.
[0270] Ceccarelli D, Daccord A, René M, Burrus V. Identification of the origin of transfer (oriT) and a new gene required for mobilization of the SXT/R391 family of integrating conjugative elements. J Bacteriol. 2008 August; 190(15):5328-38. doi: 10.1128/JB.00150-08. Epub 2008 Jun. 6. PubMed PMID: 18539733.
[0271] Datsenko K A, Wanner B L. One-step inactivation of chromosomal genes in Escherichia coli K-12 using PCR products. Proc Natl Acad Sci USA. 2000 Jun. 6; 97(12):6640-5. PubMed PMID: 10829079.
[0272] Datta S, Costantino N, Court D L. A set of recombineering plasmids for gram-negative bacteria. Gene. 2006 Sep. 1; 379:109-15. Epub 2006 May 4. PubMed PMID: 16750601.
[0273] Davey H M. Life, death, and in-between: meanings and methods in microbiology. Appl Environ Microbiol. 2011 Aug. 15; 77(16):5571-6. doi: 10.1128/AEM.00744-11. Epub 2011 Jun. 24. Review. PubMed PMID: 21705550.
[0274] Ferrières L, Hémery G, Nham T, Guérout A M, Mazel D, Beloin C, Ghigo J M. Silent mischief: bacteriophage Mu insertions contaminate products of Escherichia coli random mutagenesis performed using suicidal transposon delivery plasmids mobilized by broad-host-range RP4 conjugative machinery. J Bacteriol. 2010 December; 192(24):6418-27. doi: 10.1128/JB.00621-10. Epub 2010 Oct. 8. PubMed PMID: 20935093.
[0275] Furuya N, Komano T. Initiation and termination of DNA transfer during conjugation of Incl1 plasmid R64: roles of two sets of inverted repeat sequences within oriT in termination of R64 transfer. J Bacteriol. 2000 June; 182(11):3191-6. PubMed PMID: 10809699.
[0276] Goryshin I Y, Miller J A, Kil Y V, Lanzov V A, Reznikoff W S. Tn5/IS50 target recognition. Proc Natl Acad Sci USA. 1998 Sep. 1; 95(18):10716-21. PubMed PMID: 9724770.
[0277] Green R, Rogers E J. Transformation of chemically competent E. coli. Methods Enzymol. 2013; 529:329-36. doi: 10.1016/6978-0-12-418687-3.00028-8. PubMed PMID:24011059.
[0278] Guzman L M, Belin D, Carson M J, Beckwith J. Tight regulation, modulation, and high-level expression by vectors containing the arabinose PBAD promoter. J Bacteriol. 1995 July; 177(14):4121-30. PubMed PMID: 7608087.
[0279] Haeussler M, Raney B J, Hinrichs A S, Clawson H, Zweig A S, Karolchik D, Casper J, Speir M L, Haussler D, Kent W J. Navigating protected genomics data with UCSC Genome Browser in a Box. Bioinformatics. 2015 Mar. 1; 31(5):764-6. doi: 10.1093/bioinformatics/btu712. Epub 2014 Oct. 27. PubMed PMID: 25348212.
[0280] Ishiwa A, Komano T. Thin pilus PilV adhesins of plasmid R64 recognize specific structures of the lipopolysaccharide molecules of recipient cells. J Bacteriol. 2003 September; 185(17):5192-9. PubMed PMID: 12923092.
[0281] Kotula J W, Kerns S J, Shaket L A, Siraj L, Collins J J, Way J C, Silver P A. Programmable bacteria detect and record an environmental signal in the mammalian gut. Proc Natl Acad Sci USA. 2014 Apr. 1; 111(13):4838-43. doi: 10.1073/pnas.1321321111. Epub 2014 Mar. 17. PubMed PMID: 24639514.
[0282] Kvitko B H, Bruckbauer S, Prucha J, McMillan I, Breland E J, Lehman S, Mladinich K, Choi K H, Karkhoff-Schweizer R, Schweizer H P. A simple method for construction of pir+ Enterobacterial hosts for maintenance of R6K replicon plasmids. BMC Res Notes. 2012 Mar. 20; 5:157. doi: 10.1186/1756-0500-5-157. PubMed PMID: 22433797.
[0283] Li, H (2013) Aligning sequence reads, clone sequences and assembly contigs with BWA-MEM. arXiv:1303.3997v1 [q-bio.GN].
[0284] Lutz R, Bujard H. Independent and tight regulation of transcriptional units in Escherichia coli via the LacR/O, the TetR/O and AraC/11-12 regulatory elements. Nucleic Acids Res. 1997 Mar. 15; 25(6):1203-10. PubMed PMID: 9092630.
[0285] Marchler-Bauer A, Bo Y, Han L, He J, Lanczycki C J, Lu S, Chitsaz F, Derbyshire M K, Geer R C, Gonzales N R, Gwadz M, Hurwitz D I, Lu F, Marchler G H, Song J S, Thanki N, Wang Z, Yamashita R A, Zhang D, Zheng C, Geer L Y, Bryant S H. CDD/SPARCLE: functional classification of proteins via subfamily domain architectures. Nucleic Acids Res. 2017 Jan. 4; 45(D1):D200-D203. doi: 10.1093/nar/gkw1129. Epub 2016 Nov. 29. PubMed PMID: 27899674.
[0286] McKenzie G J, Craig N L. Fast, easy and efficient: site-specific insertion of transgenes into enterobacterial chromosomes using Tn7 without need for selection of the insertion event. BMC Microbiol. 2006 Apr. 28; 6:39. PubMed PMID: 16646962.
[0287] Metcalf W W, Jiang W, Wanner B L. Use of the rep technique for allele replacement to construct new Escherichia coli hosts for maintenance of R6K gamma origin plasmids at different copy numbers. Gene. 1994 Jan. 28; 138(1-2):1-7. PubMed PMID: 8125283.
[0288] Ormo M, Cubitt A B, Kallio K, Gross L A, Tsien R Y, Remington S J. Crystal structure of the Aequorea victoria green fluorescent protein. Science. 1996 Sep. 6; 273(5280):1392-5. PubMed PMID: 8703075.
[0289] Papagiannitsis C C, Tzouvelekis L S, Kotsakis S D, Tzelepi E, Miriagou V. Sequence of pR3521, an IncB plasmid from Escherichia coli encoding ACC-4, SCO-1, and TEM-1 beta-lactamases. Antimicrob Agents Chemother. 2011 January; 55(1):376-81. doi: 10.1128/AAC.00875-10. Epub 2010 Oct. 18. PubMed PMID: 20956594.
[0290] Praszkier J, Pittard A J. Control of replication in I-complex plasmids. Plasmid. 2005 March; 53(2):97-112. Review. PubMed PMID: 15737397.
[0291] Rice P, Longden I, Bleasby A. EMBOSS: the European Molecular Biology Open Software Suite. Trends Genet. 2000 June; 16(6):276-7. PubMed PMID: 10827456.
[0292] Rodrigue S, Materna A C, Timberlake S C, Blackburn M C, Malmstrom R R, Alm E J, Chisholm S W. Unlocking short read sequencing for metagenomics. PLoS One. 2010 Jul. 28; 5(7):e11840. doi: 10.1371/journal.pone.0011840. PubMed PMID: 20676378.
[0293] Ronchel M C, Ramos J L. Dual system to reinforce biological containment of recombinant bacteria designed for rhizoremediation. Appl Environ Microbiol. 2001 June; 67(6):2649-56. PubMed PMID: 11375176; PubMed Central PMCID: PMC92920.
[0294] Schindelin J, Arganda-Carreras I, Frise E, Kaynig V, Longair M, Pietzsch T, Preibisch S, Rueden C, Saalfeld S, Schmid B, Tinevez J Y, White D J, Hartenstein V, Eliceiri K, Tomancak P, Cardona A. Fiji: an open-source platform for biological-image analysis. Nat Methods. 2012 Jun. 28; 9(7):676-82. doi: 10.1038/nmeth.2019. PubMed PMID: 22743772.
[0295] Seiffert S N, Carattoli A, Schwendener S, Collaud A, Endimiani A, Perreten V. Plasmids Carrying bla(CMY-2/4) in Escherichia coli from Poultry, Poultry Meat, and Humans Belong to a Novel IncK Subgroup Designated IncK2. Front Microbiol. 2017 Mar. 15; 8:407. doi: 10.3389/fmicb.2017.00407. eCollection 2017. PubMed PMID: 28360894.
[0296] Sekizuka T, Kawanishi M, Ohnishi M, Shima A, Kato K, Yamashita A, Matsui M, Suzuki S, Kuroda M. Elucidation of quantitative structural diversity of remarkable rearrangement regions, shufflons, in IncI2 plasmids. Sci Rep. 2017 Apr. 19; 7(1):928. doi: 10.1038/s41598-017-01082-y. PubMed PMID: 28424528.
[0297] Shaner N C, Lambert G G, Chammas A, Ni Y, Cranfill P J, Baird M A, Sell B R, Allen J R, Day R N, Israelsson M, Davidson M W, Wang J. A bright monomeric green fluorescent protein derived from Branchiostoma lanceolatum. Nat Methods. 2013 May; 10(5):407-9. doi: 10.1038/nmeth.2413. Epub 2013 Mar. 24. PubMed PMID: 23524392.
[0298] Sonnenborn, U. & Schulze, J. The non-pathogenic Escherichia coli strain Nissle 1917—features of a versatile probiotic. Microb. Ecol. Health Dis. 21, 122-158 (2009).
[0299] Venturini C, Hassan K A, Roy Chowdhury P, Paulsen I T, Walker M J, Djordjevic S P. Sequences of two related multiple antibiotic resistance virulence plasmids sharing a unique IS26-related molecular signature isolated from different Escherichia coli pathotypes from different hosts. PLoS One. 2013 Nov. 4; 8(11):e78862. doi: 10.1371/journal.pone.0078862. eCollection 2013. PubMed PMID: 24223859.

The application's sequence listing, which the Patent Office published only in electronic form, follows.

SEQUENCE LISTING (223 sequences)

SEQ ID NO: 1 - DNA, 60 bp, Artificial Sequence
  oligonucleotide oBXB1-F
atttccccgaaaagtgccacctgacgtctaagaaaccattcacgaggcagaatttcagat

SEQ ID NO: 2 - DNA, 60 bp, Artificial Sequence
  oligonucleotide oBXB1-R
atcccctgattctgtggataaccgtattaccgcctttgagcgccctgcaggaaataataa

SEQ ID NO: 3 - DNA, 60 bp, Artificial Sequence
  oligonucleotide oBXB2-F
gattattaatccggcttttttattatttcctgcagggcgctcaaaggcggtaatacggtt

SEQ ID NO: 4 - DNA, 60 bp, Artificial Sequence
  oligonucleotide oBXB2-R
aagctaaggattttttttatctgaaattctgcctcgtgaatggtttcttagacgtcaggt

SEQ ID NO: 5 - DNA, 60 bp, Artificial Sequence
  oligonucleotide oKIL1-F
aaccaccgcggtctcagtggtgtacggtacaaaccccgaccgacagtaagacgggtaagc

SEQ ID NO: 6 - DNA, 60 bp, Artificial Sequence
  oligonucleotide oKIL1-R
tatactttctagagaataggaacttcggaataggaacttcggctgaaagcgctatttctt

SEQ ID NO: 7 - DNA, 60 bp, Artificial Sequence
  oligonucleotide oKIL2-F
aagttcctattctctagaaagtataggaacttcgtgcactgattaagcattggtaacagg

SEQ ID NO: 8 - DNA, 60 bp, Artificial Sequence
  oligonucleotide oKIL2-R
tttcgggacattcaggagattttcgccggacgtacgcattttcagcacactgagacttgt

SEQ ID NO: 9 - DNA, 60 bp, Artificial Sequence
  oligonucleotide oKIL3-F
aatgcgtacgtccggcgaaaatctcctgaatgtcccgaaagggcagaaagatgaatgact

SEQ ID NO: 10 - DNA, 60 bp, Artificial Sequence
  oligonucleotide oKIL3-R
ctaaaacagggattggctgagacgaaagaatctattatacagaaaaattttcctgaaagc

SEQ ID NO: 11 - DNA, 60 bp, Artificial Sequence
  oligonucleotide oKIL4-F
ttctgtataatagattctttcgtctcagccaatccctgttttagagctagaaatagcaag

SEQ ID NO: 12 - DNA, 60 bp, Artificial Sequence
  oligonucleotide oKIL4-R
aaccgagtgaccaagagaggatgaagcatttgccgagtagttcagcacactgagacttgt

SEQ ID NO: 13 - DNA, 63 bp, Artificial Sequence
  oligonucleotide oKIL5-F
ctactcggcaaatgcttcatcctctcttggtcactcggttgggcagaaagatgaatgactgtc

SEQ ID NO: 14 - DNA, 60 bp, Artificial Sequence
  oligonucleotide oKIL5-R
ctaaaactattggccacgtttaaatcagaatctattatacagaaaaattttcctgaaagc

SEQ ID NO: 15 - DNA, 60 bp, Artificial Sequence
  oligonucleotide oKIL6-F
ttctgtataatagattctgatttaaacgtggccaatagttttagagctagaaatagcaag

SEQ ID NO: 16 - DNA, 60 bp, Artificial Sequence
  oligonucleotide oKIL6-R
gtcggaaaagtggccatcatttgacgaactacagcccgggttcagcacactgagacttgt

SEQ ID NO: 17 - DNA, 60 bp, Artificial Sequence
  oligonucleotide oKIL7-F
cccgggctgtagttcgtcaaatgatggccacttttccgacggtgctgaccccggatgaat

SEQ ID NO: 18 - DNA, 60 bp, Artificial Sequence
  oligonucleotide oKIL7-R
atcattctatagtattaagtattgttttatggctgataaaagcgcttttgaagctggggt

SEQ ID NO: 19 - DNA, 60 bp, Artificial Sequence
  oligonucleotide oKIL8-F
gttcttcgcccaccccagcttcaaaagcgcttttatcagccataaaacaatacttaatac

SEQ ID NO: 20 - DNA, 60 bp, Artificial Sequence
  oligonucleotide oKIL8-R
caccactgagaccgcggtggttgaccagacaaaccacgactcagtcacctcctagctgac

SEQ ID NO: 21 - DNA, 60 bp, Artificial Sequence; identical to SEQ ID NO: 7
  oligonucleotide oKIL9-F

SEQ ID NO: 22 - DNA, 60 bp, Artificial Sequence; identical to SEQ ID NO: 16
  oligonucleotide oKIL9-R

SEQ ID NO: 23 - DNA, 60 bp, Artificial Sequence
  oligonucleotide oGST1-F
gatcctagtaagccacgttttaattaatcagatcccgggctagtatgacgtctgtcgcac

SEQ ID NO: 24 - DNA, 60 bp, Artificial Sequence
  oligonucleotide oGST1-R
gtaggttatttatataattcatccattcccataacatctgtttacagctagctcagtcct

SEQ ID NO: 25 - DNA, 60 bp, Artificial Sequence
  oligonucleotide oGST2-F
aagctagcataatacctaggactgagctagctgtaaacagatgttatgggaatggatgaa

SEQ ID NO: 26 - DNA, 60 bp, Artificial Sequence
  oligonucleotide oGST2-R
ccccaaaactttccccaaaacccttccccaaaactggctatactcgaggcatgcctgcag

SEQ ID NO: 27 - DNA, 60 bp, Artificial Sequence
  oligonucleotide oGST3-F
ggattagataccctggtagtcctgcaggcatgcctcgagtatagccagttttggggaagg

SEQ ID NO: 28 - DNA, 60 bp, Artificial Sequence
  oligonucleotide oGST3-R
ggggtcgacgcggccgtggcgcgcctcctaggtgctcgagctaggtcgacgcttggattc

SEQ ID NO: 29 - DNA, 60 bp, Artificial Sequence
  oligonucleotide oGSS1-F
ggatcctagtaagccacgttttaattaatcagatcccgggcctacgggaggcagcagtgg

SEQ ID NO: 30 - DNA, 60 bp, Artificial Sequence
  oligonucleotide oGSS1-R
cggggaactaggagggtatggtgcgcgcatggaaagactaccagggtatctaatcctgtt

SEQ ID NO: 31 - DNA, 60 bp, Artificial Sequence
  oligonucleotide oGSS2-F
cgcaccataccctcctagttccccggttatctctcctgtctcttatacacatctgacgct

SEQ ID NO: 32 - DNA, 60 bp, Artificial Sequence
  oligonucleotide oGSS2-R
ggggtcgacgcggccgtggcgcgcctcctaggtgctcgaggcaagcgaaccggaattgcc

SEQ ID NO: 33 - DNA, 60 bp, Artificial Sequence; identical to SEQ ID NO: 23
  oligonucleotide oGSC1-F

SEQ ID NO: 34 - DNA, 60 bp, Artificial Sequence
  oligonucleotide oGSC1-R1
tgctagctttgaaaattaagaggtatatattattgaatcgaactaatattttttttggtg

SEQ ID NO: 35 - DNA, 60 bp, Artificial Sequence
  oligonucleotide oGSC1-R2
gtgtcaacgtttacagctagctcagtcctaggtattatgctagctttgaaaattaagagg

SEQ ID NO: 36 - DNA, 60 bp, Artificial Sequence
  oligonucleotide oGSC2-F1
tacctaggactgagctagctgtaaacgttgacaccatcgaatggtgcaaaacctttcgcg

SEQ ID NO: 37 - DNA, 60 bp, Artificial Sequence
  oligonucleotide oGSC2-F2
atatcccgaatgtgcagttaacgacgttgacaccatcgaatggtgcaaaacctttcgcgg

SEQ ID NO: 38 - DNA, 40 bp, Artificial Sequence
  oligonucleotide oGSC2-R
taatatatacctctttaatttttaataataaagttaatcg

SEQ ID NO: 39 - DNA, 60 bp, Artificial Sequence
  oligonucleotide oGSC3-F
tattattaaaaattaaagaggtatatattaatggtttctaaaggagaagaaaaaaatatg

SEQ ID NO: 40 - DNA, 60 bp, Artificial Sequence
  oligonucleotide oGSC3-R
cctctttccactgctgcctcccgtaggttatttatataattcatccattcccataacatc

SEQ ID NO: 41 - DNA, 60 bp, Artificial Sequence
  oligonucleotide oGSC4-F
agcatttacagatgttatgggaatggatgaattatataaataacctacgggaggcagcag

SEQ ID NO: 42 - DNA, 60 bp, Artificial Sequence
  oligonucleotide oGSC4-R
acctcttacgtgcccgatcaactcgaggcatgcctgcaggactaccagggtatctaatcc

SEQ ID NO: 43 - DNA, 60 bp, Artificial Sequence
  oligonucleotide oGSC5-F
gaacaggattagataccctggtagtcctgcaggcatgcctcgagttgatcgggcacgtaa

SEQ ID NO: 44 - DNA, 60 bp, Artificial Sequence
  oligonucleotide oGSC5-R
ggtcgacgcggccgtggcgcgcctcctaggtgctcgagctcgaggcttggattctcacca

SEQ ID NO: 45 - DNA, 60 bp, Artificial Sequence
  oligonucleotide oDTD1-F
cgcgtgcctcggcaaaatgcccttctgctgccagtttgcagtgtaggctggagctgcttc

SEQ ID NO: 46 - DNA, 60 bp, Artificial Sequence
  oligonucleotide oDTD1-R
aaacgtaccattgagacacttgtttgcacagaggatggccctgggaattagccatggtcc

SEQ ID NO: 47 - DNA, 60 bp, Artificial Sequence
  oligonucleotide oDTD2-F
caaatagtttgttgtgtaatggcatcagacgctgattaataacgcgtgcctcggcaaaat

SEQ ID NO: 48 - DNA, 60 bp, Artificial Sequence
  oligonucleotide oDTD2-R
acggttctgtctgcttgcttttaatgccataccaaacgtaccattgagacacttgtttgc

SEQ ID NO: 49 - DNA, 20 bp, Artificial Sequence
  oligonucleotide oDTD3-int
ccgtttctgcggactggctt

SEQ ID NO: 50 - DNA, 20 bp, Artificial Sequence
  oligonucleotide oDTD23-F
tagcggctatcaccaacatc

SEQ ID NO: 51 - DNA, 22 bp, Artificial Sequence
  oligonucleotide oDTD3-R
gtgaagcgccttatgaacaatg

SEQ ID NO: 52 - DNA, 60 bp, Artificial Sequence
  oligonucleotide oREC1-F
gacgacggcggtctccgtcgtcaggatcatccgggcggaggatattcatatggaccatgg

SEQ ID NO: 53 - DNA, 60 bp, Artificial Sequence
  oligonucleotide oREC1-R
tatactttctagagaataggaacttcggaataggaacttcttttgcggccgcaagatccg

SEQ ID NO: 54 - DNA, 60 bp, Artificial Sequence
  oligonucleotide oREC2-F
tattccgaagttcctattctctagaaagtataggaacttcatagccagttttggggaagg

SEQ ID NO: 55 - DNA, 60 bp, Artificial Sequence
  oligonucleotide oREC2-R
tcctgacgacggagaccgccgtcgtcgacaagccggccgactaggtcgacgcttggattc

SEQ ID NO: 56 - DNA, 60 bp, Artificial Sequence
  oligonucleotide oTPT1-F
acatggcaaaggtagcgttgccaatgatgttacagatgagcggatcttgcggccgcaaaa

SEQ ID NO: 57 - DNA, 60 bp, Artificial Sequence
  oligonucleotide oTPT1-R
gccgatgcgccaaccgcattcattaaagactaactaccatggtccatatgaatatcctcc

SEQ ID NO: 58 - DNA, 24 bp, Artificial Sequence
  oligonucleotide oTPT2-F
gagccatattcaacgggaaacgtc

SEQ ID NO: 59 - DNA, 21 bp, Artificial Sequence
  oligonucleotide oTPT2-R
cacatcggtgaaagctatgcc

SEQ ID NO: 60 - DNA, 20 bp, Artificial Sequence
  oligonucleotide oTPK1-F
gctcgcttggactcctgttg

SEQ ID NO: 61 - DNA, 21 bp, Artificial Sequence
  oligonucleotide oTPK1-R
cgttggcaagactggcatgat

SEQ ID NO: 62 - DNA, 25 bp, Artificial Sequence
  oligonucleotide oTPK2-F
ttgaagggtagtccagaagataacg

SEQ ID NO: 63 - DNA, 21 bp, Artificial Sequence
  oligonucleotide oTPK2-R
ggtaaatggcactacaggcgc

SEQ ID NO: 64 - DNA, 27 bp, Artificial Sequence
  oligonucleotide oTPK3
cctgttaccaatgcttaatcagtgcac

SEQ ID NO: 65 - DNA, 27 bp, Artificial Sequence
  oligonucleotide oTPK4-F
gtgcactgattaagcattggtaacagg

SEQ ID NO: 66 - DNA, 20 bp, Artificial Sequence
  oligonucleotide oTPK4-R
ggtcagcaccgtcggaaaag

SEQ ID NO: 67 - DNA, 22 bp, Artificial Sequence
  oligonucleotide oTPS1-F
tgctgaaccagtaacaaccacc

SEQ ID NO: 68 - DNA, 20 bp, Artificial Sequence
  oligonucleotide oTPS1-R
gtcgccgctgtggattcaac

SEQ ID NO: 69 - DNA, 24 bp, Artificial Sequence
  oligonucleotide oTPS2-F
gttcaatacacattacagcccacc

SEQ ID NO: 70 - DNA, 22 bp, Artificial Sequence
  oligonucleotide oTPS2-R
ctgcgctcaaagtcacgtatgg

SEQ ID NO: 71 - DNA, 24 bp, Artificial Sequence
  oligonucleotide oTPS3-F
ttacgcaacagaatctgaaagcac

SEQ ID NO: 72 - DNA, 20 bp, Artificial Sequence
  oligonucleotide oTPS3-R
gaaggtggcctgtcatcgag

SEQ ID NO: 73 - DNA, 20 bp, Artificial Sequence
  oligonucleotide oTPS4-F
tgtccgattcgtcctggttg

SEQ ID NO: 74 - DNA, 19 bp, Artificial Sequence
  oligonucleotide oTPS4-R
gtatttgtccagcgcccgg

SEQ ID NO: 75 - DNA, 20 bp, Artificial Sequence
  oligonucleotide oTPS5-F
ttcagatgcgtcgtgcaatg

SEQ ID NO: 76 - DNA, 21 bp, Artificial Sequence
  oligonucleotide oTPS5-R
cacacttgagcgtctttctga

SEQ ID NO: 77 - DNA, 20 bp, Artificial Sequence
  oligonucleotide oTPS6-F
agaagctcttgagtccgacc

SEQ ID NO: 78 - DNA, 23 bp, Artificial Sequence
  oligonucleotide oTPS6-R
gacttattccgccaacccaaatt

SEQ ID NO: 79 - DNA, 19 bp, Artificial Sequence
  oligonucleotide oTPS7-F
ggcccgctcaaggtctttc

SEQ ID NO: 80 - DNA, 23 bp, Artificial Sequence
  oligonucleotide oTPS7-R
gctggagaacaccctgattatgt

SEQ ID NO: 81 - DNA, 24 bp, Artificial Sequence
  oligonucleotide oTPS8-F
aaagttctttgcgcctgtcatagc

SEQ ID NO: 82 - DNA, 21 bp, Artificial Sequence
  oligonucleotide oTPS8-R
gaagccaggtttgttgctgtg

SEQ ID NO: 83 - DNA, 25 bp, Artificial Sequence
  oligonucleotide oTPS9-F
tttctctgctacagcatctttcttc

SEQ ID NO: 84 - DNA, 18 bp, Artificial Sequence
  oligonucleotide oTPS9-R
ggaactgcctcggtgaat

SEQ ID NO: 85 - DNA, 21 bp, Artificial Sequence
  oligonucleotide oTPS10-F
ggcataaggcgtggacaatgg

SEQ ID NO: 86 - DNA, 21 bp, Artificial Sequence
  oligonucleotide oTPS10-R
caaacgtgctaatcgcctggc

SEQ ID NO: 87 - DNA, 660 bp, Artificial Sequence
  modified cat gene with three gRNAs
atggagaaaaaaatcactggatataccaccgttgatatatcccaatggcatcgtaaagaacattttgaggcatttcagtcagttgctcaatgtacctataaccagaccgttcagctggatattacggcctttttaaagaccgtaaagaaaaataagcacaagttttatccggcctttattcacattcttgcccgcctgatgaatgctcatccggaatttcgtatggcaatgaaagacggtgagctggtgatatgggatagtgttcacccttgttacaccgttttccatgagcaaactgaaacgttttcatcgctctggagtgaataccacgacgatttccggcagtttctacacatatattcgcaagatgtggcgtgttacggtgaaaacctggcctatttccctaaagggtttattgagaatatgtttttcgtctcagccaatccctgggtgagtttcaccagttttgatttaaacgtggccaatatggacaacttcttcgcccccgttttcaccatgggcaaatattatacgcaaggcgacaaggtgctgatgccgctggcgattcaggttcatcatgccgtttgtgatggcttccatgtcggcagaatgcttaatgaattacaacagtactgcgatgagtggcagggcggggcgtaa

SEQ ID NO: 88 - DNA, 20 bp, Artificial Sequence
  oligonucleotide gRNA1
tttcgtctcagccaatccct

SEQ ID NO: 89 - DNA, 20 bp, Artificial Sequence
  oligonucleotide gRNA2
tcgcaagatgtggcgtgtta

SEQ ID NO: 90 - DNA, 20 bp, Artificial Sequence
  oligonucleotide gRNA3
tgatttaaacgtggccaata

SEQ ID NO: 91 - DNA, 34 bp, Artificial Sequence
  oligonucleotide
ctgtctcttatacacatctccgagcccacgagac

SEQ ID NO: 92 - DNA, 67 bp, Artificial Sequence
  oligonucleotide
caagcagaagacggcatacgagattcgccttagtctcgtgggctcggagatgtgtataagagacagt

SEQ ID NO: 93 - DNA, 60 bp, Artificial Sequence
  oligonucleotide oGSC6-F
gagcttggcgtaatcatggtcatagctgtttcctgtgtgacgcttaatgcgccgctacag

SEQ ID NO: 94 - DNA, 60 bp, Artificial Sequence
  oligonucleotide oGSC6-R
ctggtgaaagtaaaagatgctgaagatcagttgggtgcaccgcgcaattaaccctcacta

SEQ ID NO: 95 - DNA, 44 bp, Artificial Sequence
  oligonucleotide oNA1-F
attacacgtcttgagcgattcgcgactatcaccggaagagcaga

SEQ ID NO: 96 - DNA, 45 bp, Artificial Sequence
  oligonucleotide oNA1-R
gaagcagctccagcctacactcgagtttattccgcaagtgattaa

SEQ ID NO: 97 - DNA, 45 bp, Artificial Sequence
  oligonucleotide oNA2-F
ttaatcacttgcggaataaactcgagtgtaggctggagctgcttc

SEQ ID NO: 98 - DNA, 44 bp, Artificial Sequence
  oligonucleotide oNA2-R
tctgctcttccggtgatagtcgcgaatcgctcaagacgtgtaat

SEQ ID NO: 99 - DNA, 45 bp, Artificial Sequence
  oligonucleotide oNA3-F
attacacgtcttgagcgattcgcgatccccggaatacagcgtcat

SEQ ID NO: 100 - DNA, 45 bp, Artificial Sequence
  oligonucleotide oNA3-R
gaagcagctccagcctacacgaattctagtggggtggcgaagctg

SEQ ID NO: 101 - DNA, 45 bp, Artificial Sequence
  oligonucleotide oNA4-F
cagcttcgccaccccactagaattcgtgtaggctggagctgcttc

SEQ ID NO: 102 - DNA, 45 bp, Artificial Sequence
  oligonucleotide oNA4-R
atgacgctgtattccggggatcgcgaatcgctcaagacgtgtaat

SEQ ID NO: 103 - DNA, 45 bp, Artificial Sequence; identical to SEQ ID NO: 99
  oligonucleotide oNA3-F

SEQ ID NO: 104 - DNA, 45 bp, Artificial Sequence; identical to SEQ ID NO: 96
  oligonucleotide oNA1-R

SEQ ID NO: 105 - DNA, 45 bp, Artificial Sequence; identical to SEQ ID NO: 97
  oligonucleotide oNA2-F

SEQ ID NO: 106 - DNA, 45 bp, Artificial Sequence; identical to SEQ ID NO: 102
  oligonucleotide oNA4-R

SEQ ID NO: 107 - DNA, 60 bp, Artificial Sequence
  oligonucleotide opir1-F
cctagtaagccacgttttaattaatcagatcccgggcatgagtggatagtacgttgctaa

SEQ ID NO: 108 - DNA, 60 bp, Artificial Sequence
  oligonucleotide opir1-R
gtcagtttaggttaggcgccatgcatctcgaggcttggtcaccccttagcttttttggga

SEQ ID NO: 109 - DNA, 20 bp, Artificial Sequence
  oligonucleotide opir2-F
ccaagcctcgagatgcatgg

SEQ ID NO: 110 - DNA, 60 bp, Artificial Sequence
  oligonucleotide opir2-R
cgcggccgtggcgcgcctcctaggtgctcgagggacgtctaagaaaccattattatcatg

SEQ ID NO: 111 - DNA, 20 bp, Artificial Sequence
  oligonucleotide opir3-F
gatgctggtggcgaagctgt

SEQ ID NO: 112 - DNA, 21 bp, Artificial Sequence
  oligonucleotide opir3-R
gatgacggtttgtcacatgga

SEQ ID NO: 113 - DNA, 60 bp, Artificial Sequence
  oligonucleotide opir3-in
acgtccatcatgaccttgagtctcataaaaaaacctcatcattctgtatatcttaacgcc

SEQ ID NO: 114 - DNA, 60 bp, Artificial Sequence
  oRep1-F
cgttaaaaaagacccggtcactggtcagaacacactcagagtgtaggctggagctgcttc

SEQ ID NO: 115 - DNA, 60 bp, Artificial Sequence
  oligonucleotide oRep1-R
aaggggctgaagagagtgccgattgtatcaggcagctaaactgtcagaccaagtttactc

SEQ ID NO: 116 - DNA, 20 bp, Artificial Sequence
  oligonucleotide oRep2-F
gattgtatcaggcagctaaa

SEQ ID NO: 117 - DNA, 20 bp, Artificial Sequence
  oligonucleotide oRep2-R
ctggtcagaacacactcaga

SEQ ID NO: 118 - DNA, 50 bp, Artificial Sequence
  oligonucleotide oNA5-F
cttaattaattaatccagaggcatcgcctgcccctcccttttggtgtcca

SEQ ID NO: 119 - DNA, 57 bp, Artificial Sequence
  oligonucleotide oNA5-R
tctagattcagctgaattcccgggtgcaccgaggcggctacagccgatagtctggaa

SEQ ID NO: 120 - DNA, 50 bp, Artificial Sequence
  oligonucleotide oNA6-F
caggcgatgcctctggattaattaattaaggcttggattctcaccaataa

SEQ ID NO: 121 - DNA, 55 bp, Artificial Sequence
  oligonucleotide oNA6-R
ttaaaaatgaagttttaaatcaatctaaagtatatatagccagttttggggaagg

SEQ ID NO: 122 - DNA, 60 bp, Artificial Sequence
  oligonucleotide oNA7-F
gtgcacccgggaattcagctgaatctagatacgtagtactaagtcctcaaggttcgtaga

SEQ ID NO: 123 - DNA, 60 bp, Artificial Sequence
  oligonucleotide oNA7-R
atatactttagattgatttaaaacttcatttttaatttgttacatttcctctctctctct

SEQ ID NO: 124 - DNA, 60 bp, Artificial Sequence
  oligonucleotide oNA8-F
ggctgtatgcacggcatttttttgtccttctaaaacacataagctttgtacacaagcccg

SEQ ID NO: 125 - DNA, 60 bp, Artificial Sequence
  oligonucleotide oNA8-R
acatgcccggaacgggcttgtgtacaaagcttatgtgttttagaaggacaaaaaaatgcc

SEQ ID NO: 126 - DNA, 60 bp, Artificial Sequence
  oligonucleotide oKN01-F
catgctggagttcttcgcccaccccagcttcaaaagcgctctgcctgcccctcccttttg

SEQ ID NO: 127 - DNA, 60 bp, Artificial Sequence
  oligonucleotide oKN01-R
tgcgccctgagtgcttgcggcagcgtgaggggatcttttgttacatttcctctctctctc

SEQ ID NO: 128 - DNA, 60 bp, Artificial Sequence
  oligonucleotide oKN02-F
tatgccaatgtaggaggtagagagagagaggaaatgtaacaaaagatcccctcacgctgc

SEQ ID NO: 129 - DNA, 60 bp, Artificial Sequence
  oligonucleotide oKN02-R
ccccgtcgagccggttggacaccaaaagggaggggcaggcagagcgcttttgaagctggg

SEQ ID NO: 130 - DNA, 60 bp, Artificial Sequence
  oligonucleotide oriT1-F
caagcattgtaacatgcccggaacgggcttgtgtacaaaggtgtaggctggagctgcttc

SEQ ID NO: 131 - DNA, 60 bp, Artificial Sequence
  oligonucleotide oriT1-R
ggtgattatgtgggttgttttgtgggttgtcaatggtgggaattagccatggtccatatg

SEQ ID NO: 132 - DNA, 60 bp, Artificial Sequence
  oligonucleotide oriT2-F
gcgccgttcggggttgcaaaggggcgtcccctttggcacaagcattgtaacatgcccgga

SEQ ID NO: 133 - DNA, 60 bp, Artificial Sequence
  oligonucleotide oriT2-R
taccttatttaaagcaatttgctcgccgtttgtgtgggtgattatgtgggttgttttgtg

SEQ ID NO: 134 - DNA, 24 bp, Artificial Sequence
  oligonucleotide oriT3-F
cccaacttaactgagaaagacacc

SEQ ID NO: 135 - DNA, 25 bp, Artificial Sequence
  oligonucleotide oriT3-R
gctagttctgtcttggtgttgttgt

SEQ ID NO: 136 - DNA, 60 bp, Artificial Sequence
  oligonucleotide opilS1-F
atgtcttctattaatattttaaatatgcgttctgttttttgtgtaggctggagctgcttc

SEQ ID NO: 137 - DNA, 60 bp, Artificial Sequence
  oligonucleotide opilS1-R
tcaggaatcagtgctgaaggtcagcgtattgctgtcagatatgggaattagccatggtcc

SEQ ID NO: 138 - DNA, 20 bp, Artificial Sequence
  oligonucleotide opilS2-F
taacgtcctgcaacactaat

SEQ ID NO: 139 - DNA, 20 bp, Artificial Sequence
  oligonucleotide opilS2-R
gcttatccgatgcacatgaa

SEQ ID NO: 140 - DNA, 19 bp, Artificial Sequence
  Shufflase recognition sites
  misc_feature (14)..(16): n is a, c, g, or t
gtgccaatccggtnnntgg

SEQ ID NO: 141 - DNA, 138 bp, Artificial Sequence
  origin of replication TP114 (oriT)
aagtcctcaaggttcgtagaaccgcactagaacggctgcgccgttcggggttgcaaaggggcgtcccctttggcacaagcattgtaacatgcccggaacgggcttgtgtacaaagcttatcgtgcctgtgttttagaa

SEQ ID NO: 142 - DNA, 92 bp, Artificial Sequence
  origin of replication R64 (oriT)
ggggtgtcggggcgaagccctgaccagatggcaattgtaatagcgtcgcgtgtgacggtattacaattgcacatcctgtcccgtttttcggg

SEQ ID NO: 143 - DNA, 8194 bp, Artificial Sequence
  Kill1 Cargo insertion device
gtcgtggtttgtctggtcaaccaccgcggtctcagtggtgtacggtacaaaccccgaccgacagtaagacgggtaagcctgttgatgataccgctgccttactgggtgcattagccagtctgaatgacctgtcacgggataatccgaagtggtcagactggaaaatcagagggcaggaactgctgaacagcaaaaagtcagatagcaccacatagcagacccgccataaaacgccctgagaagcccgtgacgggcttttcttgtattatgggtagtttccttgcatgaatccataaaaggcgcctgtagtgccatttacccccattcactgccagagccgtgagcgcagcgaactgaatgtcacgaaaaagacagcgactcaggtgcctgatggtcggagacaaaaggaatattcagcgatttgcccgagcttgcgagggtgctacttaagcctttagggttttaaggtctgttttgtagaggagcaaacagcgtttgcgacatccttttgtaatactgcggaactgactaaagtagtgagttatacacagggctgggatctattctttttatctttttttattctttctttattctataaattataaccacttgaatataaacaaaaaaaacacacaaaggtctagcggaatttacagagggtctagcagaatttacaagttttccagcaaaggtctagcagaatttacagatacccacaactcaaaggaaaaggactagtaattatcattgactagcccatctcaattggtatagtgattaaaatcacctagaccaattgagatgtatgtctgaattagttgttttcaaagcaaatgaactagcgattagtcgctatgacttaacggagcatgaaaccaagctaattttatgctgtgtggcactactcaaccccacgattgaaaaccctacaaggaaagaacggacggtatcgttcacttataaccaatacgttcagatgatgaacatcagtagggaaaatgcttatggtgtattagctaaagcaaccagagagctgatgacgagaactgtggaaatcaggaatcctttggttaaaggctttgagattttccagtggacaaactatgccaagttctcaagcgaaaaattagaattagtttttagtgaagagatattgccttatcttttccagttaaaaaaattcataaaatataatctggaacatgttaagtcttttgaaaacaaatactctatgaggatttatgagtggttattaaaagaactaacacaaaagaaaactcacaaggcaaatatagagattagccttgatgaatttaagttcatgttaatgcttgaaaataactaccatgagtttaaaaggcttaaccaatgggttttgaaaccaataagtaaagatttaaacacttacagcaatatgaaattggtggttgataagcgaggccgcccgactgatacgttgattttccaagttgaactagatagacaaatggatctcgtaaccgaacttgagaacaaccagataaaaatgaatggtgacaaaataccaacaaccattacatcagattcctacctacataacggactaagaaaaacactacacgatgctttaactgcaaaaattcagctcaccagttttgaggcaaaatttttgagtgacatgcaaagtaagtatgatctcaatggttcgttctcatggctcacgcaaaaacaacgaaccacactagagaacatactggctaaatacggaaggatctgaggttcttatggctcttgtatctatcagtgaagcatcaagactaacaaacaaaagtagaacaactgttcaccgttacatatcaaagggaaaactgtccatatgcacagatgaaaacggtgtaaaaaagatagatacatcagagcttttacgagtttttggtgcatttaaagctgttcaccatgaacagatcgacaatgtaacagatgaacagcatgtaacacctaatagaacaggtgaaaccagtaaaacaaagcaactagaacatgaaattgaacacctgagacaacttgttacagctcaacagtcacacatagacagcctgaaacaggcgatgctgcttatcgaatcaaagctgccgacaacacgggagccagtgacgcctcccgtggggaaaaaatcatggcaattctggaagaaatagcgctttcagccgaagttcctattccgaagttcctattctctagaaagtataggaacttcgtgcactgattaagcattggtaacaggtcggtcagtttcacctgatttacgtaaaaacccgcttcggcgggtttttgcttttggaggggcagaaagatgaatgactgtctcataaaaaatttatttgctttcaggaaaatttttctgtataatagattctcgcaagatgtggcgtgttagttttagagctagaaatagcaagttaaaataaggctagtccgttatcaacttgaaaaagtggcaccgagtcggtgcttttaaaaaaaaaaccccgcgcggggtttttttttacaagtctcagtgtgctgaacccgggctgtagttcgtcaaatgatggccacttttccgacggtgctgaccccggatgaatgtcagctactgggctatctggacaagggaaaacgcaagcgcaaagagaaagcaggtagcttgcagtgggcttacatggcgatagctagactgggcggttttatggacagcaagcgaaccggaattgccagctggggcgccctctggtaaggttgggaagccctgcaaagtaaactggatggctttcttgccgccaaggatctgatggcgcaggggatcaagatctgatcaagagacaggatgaggatcgtttcgcatgattgaacaagatggattgcacgcaggttctccggccgcttgggtggagaggctattcggctatgactgggcacaacagacaatcggctgctctgatgccgccgtgttccggctgtcagcgcaggggcgcccggttctttttgtcaagaccgacctgtccggtgccctgaatgaactgcaggacgaggcagcgcggctatcgtggctggccacgacgggcgttccttgcgcagctgtgctcgacgttgtcactgaagcgggaagggactggctgctattgggcgaagtgccggggcaggatctcctgtcatctcaccttgctcctgccgagaaagtatccatcatggctgatgcaatgcggcggctgcatacgcttgatccggctacctgcccattcgaccaccaagcgaaacatcgcatcgagcgagcacgtactcggatggaagccggtcttgtcgatcaggatgatctggacgaagagcatcaggggctcgcgccagccgaactgttcgccaggctcaaggcgcgcatgcccgacggcgaggatctcgtcgtgacccatggcgatgcctgcttgccgaatatcatggtggaaaatggccgcttttctggattcatcgactgtggccggctgggtgtggcggaccgctatcaggacatagcgttggctacccgtgatattgctgaagagcttggcggcgaatgggctgaccgcttcctcgtgctttacggtatcgccgctcccgattcgcagcgcatcgccttctatcgccttcttgacgagttcttctgagcgggactctggggttcgaaatgaccgaccaagcgacgcccaacctgccatcacgagatttcgattccaccgccgccttctatgaaaggttgggcttcggaatcgttttccgggacgccggctggatgatcctccagcgcggggatctcatgctggagttcttcgcccaccccagcttcaaaagcgcttttatcagccataaaacaatacttaatactatagaatgataacaaaataaactactttttaaaagaattttgtgttataatctatttattattaagtattgggtaatattttttgaagagatattttgaaaaagaaaaattaaagcatattaaactaatttcggaggtcattaaaactattattgaaatcatcaaactcattatggatttaatttaaactttttattttaggaggcaaaaatggataagaaatactcaataggcttagatatcggcacaaatagcgtcggatgggcggtgatcactgatgaatataaggttccgtctaaaaagttcaaggttctgggaaatacagaccgccacagtatcaaaaaaaatcttataggggctcttttatttgacagtggagagacagcggaagcgactcgtctcaaacggacagctcgtagaaggtatacacgtcggaagaatcgtatttgttatctacaggagattttttcaaatgagatggcgaaagtagatgatagtttctttcatcgacttgaagagtcttttttggtggaagaagacaagaagcatgaacgtcatcctatttttggaaatatagtagatgaagttgcttatcatgagaaatatccaactatctatcatctgcgaaaaaaattggtagattctactgataaagcggatttgcgcttaatctatttggccttagcgcatatgattaagtttcgtggtcattttttgattgagggagatttaaatcctgataatagtgatgtggacaaactatttatccagttggtacaaacctacaatcaattatttgaagaaaaccctattaacgcaagtggagtagatgctaaagcgattctttctgcacgattgagtaaatcaagacgattagaaaatctcattgctcagctccccggtgagaagaaaaatggcttatttgggaatctcattgctttgtcattgggtttgacccctaattttaaatcaaattttgatttggcagaagatgctaaattacagctttcaaaagatacttacgatgatgatttagataatttattggcgcaaattggagatcaatatgctgatttgtttttggcagctaagaatttatcagatgctattttactttcagatatcctaagagtaaatactgaaataactaaggctcccctatcagcttcaatgattaaacgctacgatgaacatcatcaagacttgactcttttaaaagctttagttcgacaacaacttccagaaaagtataaagaaatcttttttgatcaatcaaaaaacggatatgcaggttatattgatgggggagctagccaagaagaattttataaatttatcaaaccaattttagaaaaaatggatggtactgaggaattattggtgaaactaaatcgtgaagatttgctgcgcaagcaacggacctttgacaacggctctattccccatcaaattcacttgggtgagctgcatgctattttgagaagacaagaagacttttatccatttttaaaagacaatcgtgagaagattgaaaaaatcttgacttttcgaattccttattatgttggtccattggcgcgtggcaatagtcgttttgcatggatgactcggaagtctgaagaaacaattaccccatggaattttgaagaagttgtcgataaaggtgcttcagctcaatcatttattgaacgcatgacaaactttgataaaaatcttccaaatgaaaaagtactaccaaaacatagtttgctttatgagtattttacggtttataacgaattgacaaaggtcaaatatgttactgaaggaatgcgaaaaccagcatttctttcaggtgaacagaagaaagccattgttgatttactcttcaaaacaaatcgaaaagtaaccgttaagcaattaaaagaagattatttcaaaaaaatagaatgttttgatagtgttgaaatttcaggagttgaagatagatttaatgcttcattaggtacctaccatgatttgctaaaaattattaaagataaagattttttggataatgaagaaaatgaagatatcttagaggatattgttttaacattgaccttatttgaagatagggagatgattgaggaaagacttaaaacatatgctcacctctttgatgataaggtgatgaaacagcttaaacgtcgccgttatactggttggggacgtttgtctcgaaaattgattaatggtattagggataagcaatctggcaaaacaatattagattttttgaaatcagatggttttgccaatcgcaattttatgcagctgatccatgatgatagtttgacatttaaagaagacattcaaaaagcacaagtgtctggacaaggcgatagtttacatgaacatattgcaaatttagctggtagccctgctattaaaaaaggtattttacagactgtaaaagttgttgatgaattggtcaaagtaatggggcggcataagccagaaaatatcgttattgaaatggcacgtgaaaatcagacaactcaaaagggccagaaaaattcgcgagagcgtatgaaacgaatcgaagaaggtatcaaagaattaggaagtcagattcttaaagagcatcctgttgaaaatactcaattgcaaaatgaaaagctctatctctattatctccaaaatggaagagacatgtatgtggaccaagaattagatattaatcgtttaagtgattatgatgtcgatcacattgttccacaaagtttccttaaagacgattcaatagacaataaggtcttaacgcgttctgataaaaatcgtggtaaatcggataacgttccaagtgaagaagtagtcaaaaagatgaaaaactattggagacaacttctaaacgccaagttaatcactcaacgtaagtttgataatttaacgaaagctgaacgtggaggtttgagtgaacttgataaagctggttttatcaaacgccaattggttgaaactcgccaaatcactaagcatgtggcacaaattttggatagtcgcatgaatactaaatacgatgaaaatgataaacttattcgagaggttaaagtgattaccttaaaatctaaattagtttctgacttccgaaaagatttccaattctataaagtacgtgagattaacaattaccatcatgcccatgatgcgtatctaaatgccgtcgttggaactgctttgattaagaaatatccaaaacttgaatcggagtttgtctatggtgattataaagtttatgatgttcgtaaaatgattgctaagtctgagcaagaaataggcaaagcaaccgcaaaatatttcttttactctaatatcatgaacttcttcaaaacagaaattacacttgcaaatggagagattcgcaaacgccctctaatcgaaactaatggggaaactggagaaattgtctgggataaagggcgagattttgccacagtgcgcaaagtattgtccatgccccaagtcaatattgtcaagaaaacagaagtacagacaggcggattctccaaggagtcaattttaccaaaaagaaattcggacaagcttattgctcgtaaaaaagactgggatccaaaaaaatatggtggttttgatagtccaacggtagcttattcagtcctagtggttgctaaggtggaaaaagggaaatcgaagaagttaaaatccgttaaagagttactagggatcacaattatggaaagaagttcctttgaaaaaaatccgattgactttttagaagctaaaggatataaggaagttaaaaaagacttaatcattaaactacctaaatatagtctttttgagttagaaaacggtcgtaaacggatgctggctagtgccggagaattacaaaaaggaaatgagctggctctgccaagcaaatatgtgaattttttatatttagctagtcattatgaaaagttgaagggtagtccagaagataacgaacaaaaacaattgtttgtggagcagcataagcattatttagatgagattattgagcaaatcagtgaattttctaagcgtgttattttagcagatgccaatttagataaagttcttagtgcatataacaaacatagagacaaaccaatacgtgaacaagcagaaaatattattcatttatttacgttgacgaatcttggagctcccgctgcttttaaatattttgatacaacaattgatcgtaaacgatatacgtctacaaaagaagttttagatgccactcttatccatcaatccatcactggtctttatgaaacacgcattgatttgagtcagctaggaggtgactga

SEQ ID NO: 144 - DNA, 8722 bp, Artificial Sequence
  Kill3 Cargo insertion device
gtcgtggtttgtctggtcaaccaccgcggtctcagtggtgtacggtacaaaccccgaccgacagtaagacgggtaagcctgttgatgataccgctgccttactgggtgcattagccagtctgaatgacctgtcacgggataatccgaagtggtcagactggaaaatcagagggcaggaactgctgaacagcaaaaagtcagatagcaccacatagcagacccgccataaaacgccctgagaagcccgtgacgggcttttcttgtattatgggtagtttccttgcatgaatccataaaaggcgcctgtagtgccatttacccccattcactgccagagccgtgagcgcagcgaactgaatgtcacgaaaaagacagcgactcaggtgcctgatggtcggagacaaaaggaatattcagcgatttgcccgagcttgcgagggtgctacttaagcctttagggttttaaggtctgttttgtagaggagcaaacagcgtttgcgacatccttttgtaatactgcggaactgactaaagtagtgagttatacacagggctgggatctattctttttatctttttttattctttctttattctataaattataaccacttgaatataaacaaaaaaaacacacaaaggtctagcggaatttacagagggtctagcagaatttacaagttttccagcaaaggtctagcagaatttacagatacccacaactcaaaggaaaaggactagtaattatcattgactagcccatctcaattggtatagtgattaaaatcacctagaccaattgagatgtatgtctgaattagttgttttcaaagcaaatgaactagcgattagtcgctatgacttaacggagcatgaaaccaagctaattttatgctgtgtggcactactcaaccccacgattgaaaaccctacaaggaaagaacggacggtatcgttcacttataaccaatacgttcagatgatgaacatcagtagggaaaatgcttatggtgtattagctaaagcaaccagagagctgatgacgagaactgtggaaatcaggaatcctttggttaaaggctttgagattttccagtggacaaactatgccaagttctcaagcgaaaaattagaattagtttttagtgaagagatattgccttatcttttccagttaaaaaaattcataaaatataatctggaacatgttaagtcttttgaaaacaaatactctatgaggatttatgagtggttattaaaagaactaacacaaaagaaaactcacaaggcaaatatagagattagccttgatgaatttaagttcatgttaatgcttgaaaataactaccatgagtttaaaaggcttaaccaatgggttttgaaaccaataagtaaagatttaaacacttacagcaatatgaaattggtggttgataagcgaggccgcccgactgatacgttgattttccaagttgaactagatagacaaatggatctcgtaaccgaacttgagaacaaccagataaaaatgaatggtgacaaaataccaacaaccattacatcagattcctacctacataacggactaagaaaaacactacacgatgctttaactgcaaaaattcagctcaccagttttgaggcaaaatttttgagtgacatgcaaagtaagtatgatctcaatggttcgttctcatggctcacgcaaaaacaacgaaccacactagagaacatactggctaaatacggaaggatctgaggttcttatggctcttgtatctatcagtgaagcatcaagactaacaaacaaaagtagaacaactgttcaccgttacatatcaaagggaaaactgtccatatgcacagatgaaaacggtgtaaaaaagatagatacatcagagcttttacgagtttttggtgcatttaaagctgttcaccatgaacagatcgacaatgtaacagatgaacagcatgtaacacctaatagaacaggtgaaaccagtaaaacaaagcaactagaacatgaaattgaacacctgagacaacttgttacagctcaacagtcacacatagacagcctgaaacaggcgatgctgcttatcgaatcaaagctgccgacaacacgggagccagtgacgcctcccgtggggaaaaaatcatggcaattctggaagaaatagcgctttcagccgaagttcctattccgaagttcctattctctagaaagtataggaacttcgtgcactgattaagcattggtaacaggtcggtcagtttcacctgatttacgtaaaaacccgcttcggcgggtttttgcttttggaggggcagaaagatgaatgactgtctcataaaaaatttatttgctttcaggaaaatttttctgtataatagattctcgcaagatgtggcgtgttagttttagagctagaaatagcaagttaaaataaggctagtccgttatcaacttgaaaaagtggcaccgagtcggtgcttttaaaaaaaaaaccccgcgcggggtttttttttacaagtctcagtgtgctgaaaatgcgtacgtccggcgaaaatctcctgaatgtcccgaaagggcagaaagatgaatgactgtctcataaaaaatttatttgctttcaggaaaatttttctgtataatagattctttcgtctcagccaatccctgttttagagctagaaatagcaagttaaaataaggctagtccgttatcaacttgaaaaagtggcaccgagtcggtgcttttaaaaaaaaaaccccgcgcggggtttttttttacaagtctcagtgtgctgaactactcggcaaatgcttcatcctctcttggtcactcggttgggcagaaagatgaatgactgtctcataaaaaatttatttgctttcaggaaaatttttctgtataatagattctgatttaaacgtggccaatagttttagagctagaaatagcaagttaaaataaggctagtccgttatcaacttgaaaaagtggcaccgagtcggtgcttttaaaaaaaaaaccccgcgcggggtttttttttacaagtctcagtgtgctgaacccgggctgtagttcgtcaaatgatggccacttttccgacggtgctgaccccggatgaatgtcagctactgggctatctggacaagggaaaacgcaagcgcaaagagaaagcaggtagcttgcagtgggcttacatggcgatagctagactgggcggttttatggacagcaagcgaaccggaattgccagctggggcgccctctggtaaggttgggaagccctgcaaagtaaactggatggctttcttgccgccaaggatctgatggcgcaggggatcaagatctgatcaagagacaggatgaggatcgtttcgcatgattgaacaagatggattgcacgcaggttctccggccgcttgggtggagaggctattcggctatgactgggcacaacagacaatcggctgctctgatgccgccgtgttccggctgtcagcgcaggggcgcccggttctttttgtcaagaccgacctgtccggtgccctgaatgaactgcaggacgaggcagcgcggctatcgtggctggccacgacgggcgttccttgcgcagctgtgctcgacgttgtcactgaagcgggaagggactggctgctattgggcgaagtgccggggcaggatctcctgtcatctcaccttgctcctgccgagaaagtatccatcatggctgatgcaatgcggcggctgcatacgcttgatccggctacctgcccattcgaccaccaagcgaaacatcgcatcgagcgagcacgtactcggatggaagccggtcttgtcgatcaggatgatctggacgaagagcatcaggggctcgcgccagccgaactgttcgccaggctcaaggcgcgcatgcccgacggcgaggatctcgtcgtgacccatggcgatgcctgcttgccgaatatcatggtggaaaatggccgcttttctggattcatcgactgtggccggctgggtgtggcggaccgctatcaggacatagcgttggctacccgtgatattgctgaagagcttggcggcgaatgggctgaccgcttcctcgtgctttacggtatcgccgctcccgattcgcagcgcatcgccttctatcgccttcttgacgagttcttctgagcgggactctggggttcgaaatgaccgaccaagcgacgcccaacctgccatcacgagatttcgattccaccgccgccttctatgaaaggttgggcttcggaatcgttttccgggacgccggctggatgatcctccagcgcggggatctcatgctggagttcttcgcccaccccagcttcaaaagcgcttttatcagccataaaacaatacttaatactatagaatgataacaaaataaactactttttaaaagaattttgtgttataatctatttattattaagtattgggtaatattttttgaagagatattttgaaaaagaaaaattaaagcatattaaactaatttcggaggtcattaaaactattattgaaatcatcaaactcattatggatttaatttaaactttttattttaggaggcaaaaatggataagaaatactcaataggcttagatatcggcacaaatagcgtcggatgggcggtgatcactgatgaatataaggttccgtctaaaaagttcaaggttctgggaaatacagaccgccacagtatcaaaaaaaatcttataggggctcttttatttgacagtggagagacagcggaagcgactcgtctcaaacggacagctcgtagaaggtatacacgtcggaagaatcgtatttgttatctacaggagattttttcaaatgagatggcgaaagtagatgatagtttctttcatcgacttgaagagtcttttttggtggaagaagacaagaagcatgaacgtcatcctatttttggaaatatagtagatgaagttgcttatcatgagaaatatccaactatctatcatctgcgaaaaaaattggtagattctactgataaagcggatttgcgcttaatctatttggccttagcgcatatgattaagtttcgtggtcattttttgattgagggagatttaaatcctgataatagtgatgtggacaaactatttatccagttggtacaaacctacaatcaattatttgaagaaaaccctattaacgcaagtggagtagatgctaaagcgattctttctgcacgattgagtaaatcaagacgattagaaaatctcattgctcagctccccggtgagaagaaaaatggcttatttgggaatctcattgctttgtcattgggtttgacccctaattttaaatcaaattttgatttggcagaagatgctaaattacagctttcaaaagatacttacgatgatgatttagataatttattggcgcaaattggagatcaatatgctgatttgtttttggcagctaagaatttatcagatgctattttactttcagatatcctaagagtaaatactgaaataactaaggctcccctatcagcttcaatgattaaacgctacgatgaacatcatcaagacttgactcttttaaaagctttagttcgacaacaacttccagaaaagtataaagaaatcttttttgatcaatcaaaaaacggatatgcaggttatattgatgggggagctagccaagaagaattttataaatttatcaaaccaattttagaaaaaatggatggtactgaggaattattggtgaaactaaatcgtgaagatttgctgcgcaagcaacggacctttgacaacggctctattccccatcaaattcacttgggtgagctgcatgctattttgagaagacaagaagacttttatccatttttaaaagacaatcgtgagaagattgaaaaaatcttgacttttcgaattccttattatgttggtccattggcgcgtggcaatagtcgttttgcatggatgactcggaagtctgaagaaacaattaccccatggaattttgaagaagttgtcgataaaggtgcttcagctcaatcatttattgaacgcatgacaaactttgataaaaatcttccaaatgaaaaagtactaccaaaacatagtttgctttatgagtattttacggtttataacgaattgacaaaggtcaaatatgttactgaaggaatgcgaaaaccagcatttctttcaggtgaacagaagaaagccattgttgatttactcttcaaaacaaatcgaaaagtaaccgttaagcaattaaaagaagattatttcaaaaaaatagaatgttttgatagtgttgaaatttcaggagttgaagatagatttaatgcttcattaggtacctaccatgatttgctaaaaattattaaagataaagattttttggataatgaagaaaatgaagatatcttagaggatattgttttaacattgaccttatttgaagatagggagatgattgaggaaagacttaaaacatatgctcacctctttgatgataaggtgatgaaacagcttaaacgtcgccgttatactggttggggacgtttgtctcgaaaattgattaatggtattagggataagcaatctggcaaaacaatattagattttttgaaatcagatggttttgccaatcgcaattttatgcagctgatccatgatgatagtttgacatttaaagaagacattcaaaaagcacaagtgtctggacaaggcgatagtttacatgaacatattgcaaatttagctggtagccctgctattaaaaaaggtattttacagactgtaaaagttgttgatgaattggtcaaagtaatggggcggcataagccagaaaatatcgttattgaaatggcacgtgaaaatcagacaactcaaaagggccagaaaaattcgcgagagcgtatgaaacgaatcgaagaaggtatcaaagaattaggaagtcagattcttaaagagcatcctgttgaaaatactcaattgcaaaatgaaaagctctatctctattatctccaaaatggaagagacatgtatgtggaccaagaattagatattaatcgtttaagtgattatgatgtcgatcacattgttccacaaagtttccttaaagacgattcaatagacaataaggtcttaacgcgttctgataaaaatcgtggtaaatcggataacgttccaagtgaagaagtagtcaaaaagatgaaaaactattggagacaacttctaaacgccaagttaatcactcaacgtaagtttgataatttaacgaaagctgaacgtggaggtttgagtgaacttgataaagctggttttatcaaacgccaattggttgaaactcgccaaatcactaagcatgtggcacaaattttggatagtcgcatgaatactaaatacgatgaaaatgataaacttattcgagaggttaaagtgattaccttaaaatctaaattagtttctgacttccgaaaagatttccaattctataaagtacgtgagattaacaattaccatcatgcccatgatgcgtatctaaatgccgtcgttggaactgctttgattaagaaatatccaaaacttgaatcggagtttgtctatggtgattataaagtttatgatgttcgtaaaatgattgctaagtctgagcaagaaataggcaaagcaaccgcaaaatatttcttttactctaatatcatgaacttcttcaaaacagaaattacacttgcaaatggagagattcgcaaacgccctctaatcgaaactaatggggaaactggagaaattgtctgggataaagggcgagattttgccacagtgcgcaaagtattgtccatgccccaagtcaatattgtcaagaaaacagaagtacagacaggcggattctccaaggagtcaattttaccaaaaagaaattcggacaagcttattgctcgtaaaaaagactgggatccaaaaaaatatggtggttttgatagtccaacggtagcttattcagtcctagtggttgctaaggtggaaaaagggaaatcgaagaagttaaaatccgttaaagagttactagggatcacaattatggaaagaagttcctttgaaaaaaatccgattgactttttagaagctaaaggatataaggaagttaaaaaagacttaatcattaaactacctaaatatagtctttttgagttagaaaacggtcgtaaacggatgctggctagtgccggagaattacaaaaaggaaatgagctggctctgccaagcaaatatgtgaattttttatatttagctagtcattatgaaaagttgaagggtagtccagaagataacgaacaaaaacaattgtttgtggagcagcataagcattatttagatgagattattgagcaaatcagtgaattttctaagcgtgttattttagcagatgccaatttagataaagttcttagtgcatataacaaacatagagacaaaccaatacgtgaacaagcagaaaatattattcatttatttacgttgacgaatcttggagctcccgctgcttttaaatattttgatacaacaattgatcgtaaacgatatacgtctacaaaagaagttttagatgccactcttatccatcaatccatcactggtctttatgaaacacgcattgatttgagtcagctaggaggtgactga

SEQ ID NO: 145 - DNA, 3675 bp, Artificial Sequence
  plasmid pBXB1
cacgaggcagaatttcagataaaaaaaatccttagctttcgctaaggatgatttctggaattcgcggccgcttctagagtccctatcagtgatagagattgacatccctatcagtgatagagatactgagcacaagcttgcggctttcacacttgggggctagcgtgagagccctggtagtcatccgcctgtcccgcgtcaccgatgctacgacttcaccggagcgtcagctggagtcttgccagcagctctgcgcccagcgcggctgggacgtcgtcggggtagcggaggatctggacgtctccggggcggtcgatccgttcgaccggaagcgcagaccgaacctggcccggtggctagcgttcgaggagcaaccgtttgacgtgatcgtggcgtaccgggtagatcggttgacccgatcgatccggcatcttcagcagctggtccactgggccgaggaccacaagaagctggtcgtctccgcgaccgaagcgcacttcgatacgacgacgccgtttgcggcggtcgtcatcgcgcttatgggaacggtggcgcagatggaattagaagcgatcaaagagcggaaccgttcggctgcgcatttcaatatccgcgccgggaaataccgaggatccctgccgccgtggggatacctgcctacgcgcgtggacggggagtggcggctggtgccggaccctgtgcagcgagagcgcatcctcgaggtgtatcaccgcgtcgtcgacaaccacgagccgctgcatctggtggcccacgacctgaaccggcgtggtgtcctgtcgccgaaggactacttcgcgcagctgcaaggccgcgagccgcagggccgggagtggtcggctaccgcgctgaagcgatcgatgatctccgaggcgatgctcgggtacgcgactctgaacggtaagaccgtccgagacgacgacggagccccgctggtgcgggctgagccgatcctgacccgtgagcagctggaggcgctgcgcgccgagctcgtgaagacctcccgggcgaagcccgcggtgtctaccccgtcgctgctgctgcgggtgttgttctgcgcggtgtgcggggagcccgcgtacaagttcgccgggggaggacgtaagcacccgcgctaccgctgccgctcgatggggttcccgaagcactgcgggaacggcacggtggcgatggccgagtgggacgcgttctgcgaggagcaggtactggatctgctcggggacgcggagcgtctggagaaagtctgggtagcgggctcggactccgcggtcgaactcgcggaggtgaacgcggagctggtggacctgacgtcgctgatcggctccccggcctaccgggcgggctctccgcagcgagaagcactggatgcccgtattgcggcgctggccgcgcggcaagaggagctggagggcctggaggctcgcccgtctggctgggagtggcgcgagaccgggcagcggttcggggactggtggcgggagcaggacaccgcggcaaagaacacctggcttcggtcgatgaacgttcggctgacgttcgacgtccgcggcgggctgactcgcacgatcgacttcggggatcttcaggagtacgagcagcatctcaggctcggcagcgtggtcgaacggctacacaccgggatgtcgtaagcggccgcatgcattaataatcacactggctcaccttcgggtgggcctttctgcgtttatatactagagagagaatataaaaagccagattattaatccggcttttttattatttcctgcagggcgctcaaaggcggtaatacggttatccacagaatcaggggataacgcaggaaagaacatgtgagcaaaaggccagcaaaaggccaggaaccgtaaaaaggccgcgttgctggcgtttttccacaggctccgcccccctgacgagcatcacaaaaatcgacgctcaagtcagaggtggcgaaacccgacaggactataaagataccaggcgtttccccctggaagctccctcgtgcgctctcctgttccgaccctgccgcttaccggatacctgtccgcctttctcccttcgggaagcgtggcgctttctcatagctcacgctgtaggtatctcagttcggtgtaggtcgttcgctccaagctgggctgtgtgcacgaaccccccgttcagcccgaccgctgcgccttatccggtaactatcgtcttgagtccaacccggtaagacacgacttatcgccactggcagcagccactggtaacaggattagcagagcgaggtatgtaggcggtgctacagagttcttgaagtggtggcctaactacggctacactagaagaacagtatttggtatctgcgctctgctgaagccagttaccttcggaaaaagagttggtagctcttgatccggcaaacaaaccaccgctggtagcggtggtttttttgtttgcaagcagcagattacgcgcagaaaaaaaggatctcaagaagatcctttgatcttttctacggggtctgacgctcagtggaacgaaaactcacgttaagggattttggtcatgagattatcaaaaaggatcttcacctagatccttttaaattaaaaatgaagttttaaatcaatctaaagtatatatgagtaaacttggtctgacagttaccaatgcttaatcagtgaggcacctatctcagcgatctgtctatttcgttcatccatagttgcctgactccccgtcgtgtagataactacgatacgggagggcttaccatctggccccagtgctgcaatgataccgcgagacccacgctcaccggctccagatttatcagcaataaaccagccagccggaagggccgagcgcagaagtggtcctgcaactttatccgcctccatccagtctattaattgttgccgggaagctagagtaagtagttcgccagttaatagtttgcgcaacgttgttgccattgctacaggcatcgtggtgtcacgctcgtcgtttggtatggcttcattcagctccggttcccaacgatcaaggcgagttacatgatcccccatgttgtgcaaaaaagcggttagctccttcggtcctccgatcgttgtcagaagtaagttggccgcagtgttatcactcatggttatggcagcactgcataattctcttactgtcatgccatccgtaagatgcttttctgtgactggtgagtactcaaccaagtcattctgagaatagtgtatgcggcgaccgagttgctcttgcccggcgtcaatacgggataataccgcgccacatagcagaactttaaaagtgctcatcattggaaaacgttcttcggggcgaaaactctcaaggatcttaccgctgttgagatccagttcgatataacccactcgtgcacccaactgatcttcagcatcttttactttcaccagcgtttctgggtgagcaaaaacaggaaggcaaaatgccgcaaaaaagggaataagggcgacacggaaatgttgaatactcatactcttcctttttcaatattattgaagcatttatcagggttattgtctcatgagcggatacatatttgaatgtatttagaaaaataaacaaataggggttccgcgcacatttccccgaaaagtgccacctgacgtctaagaaaccatt

SEQ ID NO: 146 - DNA, 4487 bp, Artificial Sequence
  plasmid pFG036
gcgcccaatacgcaaaccgcctctccccgcgcgttggccgattcattaatgcagagatcttttcgccagttgacatcaggaaaatttttctgtataatgtgtggagggcccaagttcacttaaaaaggagatcaacaatgaaagcaattttcgtactgaaacatcttaatcatgcgaaggacagtttctaatgagcacaaaaaagaaaccattaacacaagagcagcttgaggacgcacgtcgccttaaagcaatttatgaaaaaaagaaaaatgaacttggcttatcccaggaatctgtcgcagacaagatggggatggggcagtcaggcgttggtgctttatttaatggcatcaatgcattaaatgcttataacgccgcattgcttgcaaaaattctcaaagttagcgttgaagaatttagcccttcaatcgccagagaaatctacgagatgtatgaagcggttagtatgcagccgtcacttagaagtgagtatgagtaccctgttttttctcatgttcaggcagggatgttctcacctgagcttagaacctttaccaaaggtgatgcggagagatgggtaagcacaaccaaaaaagccagtgattctgcattctggcttgaggttgaaggtaattccatgaccgcaccaacaggctccaagccaagctttcctgacggaatgttaattctcgttgaccctgagcaggctgttgagccaggtgatttctgcatagccagacttgggggtgatgagtttaccttcaagaaactgatcagggatagcggtcaggtgtttttacaaccactaaacccacagtacccaatgatcccatgcaatgagagttgttccgttgtggggaaagttatcgctagtcagtggcctgaagagacgtttggctgactggcgtaatagcgaagaggcccgcaccgatcgcccttcccaacagttgcgcagcctgaatggcgaatggcgcctgatgcggtattttctccttacgcatctgtgcggtatttcacaccgcatatggtgcactctcagtacaatctgctctgatgccgcatagttaagccagccccgacacccgccaacacccgctgacgcgccctgacgggcttgtctgctcccggcatccgcttacagacaagctgtgaccgtctccgggagctgcatgtgtcagaggttttcaccgtcatcaccgaaacgcgcgagacgaaagggcctcgtgatacgcctatttttataggttaatgtcatgagaattcggccagtctacatgtactctttttgataaaaaattggagattcctttacaaatatgctcttacgtgctattatttaagtgactatttaaaaggagttaataaatatgcggcaaggtattcttaaataaactgtcaatttgatagcgggaacaaataattagatgtccttttttaggagggcttagttttttgtacccagtttaagaatacctttatcatgtgattctaaagtatccagagaatatctgtatgctttgtatacctatggttatgcataaaaatcccagtgataaaagtatttatcactgggatttttatgcccttttgggtttttgaatggaggaaatctagatgaaaatcataaatatcggtgtattagctcacgttgatgcaggaaaaacaacattaactgaatcacttttatataactctggtgcaattactgaacttggttcagtagataaaggtactactcgtactgataatacattattagaacgtcaacgtggaatcacaattcaaacaggtatcacatcttttcaatgggaaaatacaaaagtaaatattatagatacacctggacacatggatttccttgcagaagtataccgtagtctttcagtattagatggtgctattttacttatcagcgctaaagatggagttcaagctcaaactcgtatcttatttcacgcattacgtaaaatgggtattccaacaattttctttataaacaaaattgaccaaaacggaattgatttaagtacagtttatcaagatatcaaagaaaaactttctgctgaaatcgttattaaacaaaaagttgaattatacccaaacgtttgcgtaacaaattttactgaatcagaacaatgggatacagttatagaaggtaatgatgatttattagaaaaatacatgtcaggtaaatcattagaagcattagaattagaacaagaagaaagtattcgtttccaaaactgttctttattccctttataccatggaagcgctaaaagtaacataggtattgataacttaattgaagttattactaacaaattttactcttcaactcatcgtggtccttctgaattatgcggtaacgttttcaaaattgaatatacaaaaaaacgtcaacgtttagcttatatacgtctttatagtggtgttttacatttacgtgatagtgttcgtgttagtgaaaaagaaaagattaaagttacagaaatgtatacttctattaacggtgaattatgcaaaattgaccgtgcatattcaggtgaaattgtaattttacaaaacgaatttcttaaacttaatagtgtacttggtgacacaaaacttttaccacaacgtaagaaaattgaaaatccacacccattacttcaaacaacagtagaaccaagcaaacctgaacaacgtgaaatgcttttagatgctcttttagaaattagtgactctgacccacttttacgttactatgtagattctactactcatgaaattattctttctttccttggtaaagttcaaatggaagttatttctgcattattacaagaaaaatatcatgttgaaatcgaattaaaagaacctactgtaatttatatggaacgtccattaaaaaatgctgaatatacaattcatattgaagttccaccaaatccattttgggcttctattggtctttctgtttctccacttccacttggtagcggaatgcaatatgaaagtagcgtaagtttaggttatcttaatcaaagtttccaaaacgcagttatggaaggtattcgttacggttgcgaacaaggtttatacggttggaatgttacagactgcaaaatctgttttaagtatggactttactattcacctgtatcaacacctgctgactttcgtatgcttgcaccaattgttttagaacaagttttaaagaaagctggaactgaacttttagaaccatacctttcttttaaaatctatgcaccacaagaatacttaagtcgtgcttataacgatgcacctaaatactgtgctaatattgttgatactcaattaaagaacaacgaagtaattttaagcggagaaattcctgcacgttgtattcaagaatatcgtagtgatttaacatttttcactaatggacgttctgtttgcttaactgaattaaaaggttatcatgttactactggtgaacctgtatgccaaccacgtcgtcctaatagtcgtattgataaagttcgttatatgttcaacaaaatcacataataatactagtagcggccgctgcagtaatacgactcactatagggcatacgatttaggtgacactatagtagggataacagggtaatttagttacttacctaggtcatgaccaaaatcccttaacgtgagttttcgttccactgagcgtcagaccccgtagaaaagatcaaaggatcttcttgagatcctttttttctgcgcgtaatctgctgcttgcaaacaaaaaaaccaccgctaccagcggtggtttgtttgccggatcaagagctaccaactctttttccgaaggtaactggcttcagcagagcgcagataccaaatactgttcttctagtgtagccgtagttaggccaccacttcaagaactctgtagcaccgcctacatacctcgctctgctaatcctgttaccagtggctgctgccagtggcgataagtcgtgtcttaccgggttggactcaagacgatagttaccggataaggcgcagcggtcgggctgaacggggggttcgtgcacacagcccagcttggagcgaacgacctacaccgaactgagatacctacagcgtgagctatgagaaagcgccacgcttcccgaagggagaaaggcggacaggtatccggtaagcggcagggtcggaacaggagagcgcacgagggagcttccagggggaaacgcctggtatctttatagtcctgtcgggtttcgccacctctgacttgagcgtcgatttttgtgatgctcgtcaggggggcggagcctatggaaaaacgccagcaacgcggcctttttacggttcctggccttttgctggccttttgctcacatgttctttcctgcgttatcccctgattctgtggataaccgtattaccgcctttgagtgagctgataccgctcgccgcagccgaacgaccgagcgcagcgagtcagtgagcgaggaagcggaaga

SEQ ID NO: 147 - DNA, 4434 bp, Artificial Sequence
  plasmid pFG051
ggcgcgcccagtctagaagaaatcctaggtaaagtggccggccctgtctcttatacacatctgacgctgccgacgaatagagaggtgtagatctcggtggtcgccgtatcattgtgtaggctggagctgcttcgaagttcctatactttctagagaataggaacttcggaataggaacttcatttaaatggcgcgccttacgcatcgatgacagtcattcatctttctgcccctccaaaagcaaaaacccgccgaagcgggtttttacgtaaatcaggtgaaactgaccgactcgagaggaacttcaagaattctcattggctggcaccaagcagtttaactgcttcatacttcacgaatttaatgagcgccgccacctgatccgcacgagcgggcaaataatcttcttcttgcccaagataagcccgcttggcattcaacaggatgggctgatgttgagctggcaagcgtgccattgcccaagtggcagcaacatcctttggcgcgatcttgccggttgctgcggtgtaccagatacgagacaaagtaagcactacattccgctcatcgcctgcccaatctggcggcgagttccatagcttcagagtatcggccagtgccttgaatagatcgctttctgggactgagctgaagagatccttcgctgctgaacctgccaagacgacgctatgttgctttgcctttgttagcagaatcgccaagtcagaatcggttgtggcgggctcgaagatgcccgcaaggatgtctttgcgctgccactctccgaactgcagttcccgcctggccggataacgccaaggtacgatgtcactgtgcacgacgatggtcacttccaaggcgcggagtgccttgttttggccaggggaagctgaaacctccaagagatcgacgagcagggcttgccgcacggcatcattgagcggtgcagctacagtcaccagcaaatcaatatcactgtacggtttcaatccgccatccagtgcggagccgtacaaatgcacggccagcaacgtcgactccaagtggcgcccgatgacgttgagtgcttgtgatagttgcaccgaaatctcggcgggcactttttcactcatgcgaaacgatcctcatcctgtctcttgatcagatcttgatcccctgcgccatcagatccttggcggcaagaaagccatccagtttactttgcagggcttcccaaccttaccagagggcgccccagctggcaattccggttcgcttgcgcatgcataacttcgtatagcatacattatacgaagttatccggatataccaccgttgatatatcccaatggcatcgtaaagaacattttgaggcatttcagtcagttgctcaatgtacctataaccagaccgttcagctggatattacggcctttttaaagaccgtaaagaaaaataagcacaagttttatccggcctttattcacattcttgcccgcctgatgaatgctcatccggaattacgtatggcaatgaaagacggtgagctggtgatatgggatagtgttcacccttgttacaccgttttccatgagcaaactgaaacgttttcatcgctctggagtgaataccacgacgatttccggcagtttctacacatatattcgcaagatgtggcgtgttacggtgaaaacctggcctatttccctaaagggtttattgagaatatgtttttcgtctcagccaatccctgggtgagtttcaccagttttgatttaaacgtggccaatatggacaacttcttcgcccccgttttcaccatgggcaaatattatacgcaaggcgacaaggtgctgatgccgctggcgattcaggttcatcatgccgtttgtgatggcttccatgtcggcagatgcttaatgaatacaacagtactgcgatgaggatcctagagatcaagccttaacgaactaagacccccgcaccgaaaggtccgggggttttttttgaccttaaaaacataaccgaggagcagacagacgtcgaagttcctatactttctagagaataggaacttcggaataggcccgggaactaaggaggatattcatatggaccatggctaattcccatgtctcgtgggctcggagatgtgtataagagacagctggtttaaaccaattcagatctctcacctaccaaacaatgcccccctgcaaaaaataaattcatataaaaaacatacagataaccatctgcggtgataaattatctctggcggtgttgacataaataccactggcggttatactgagcacatcagcaggacgcactgaccgaattcataaagaggagaaaggtaccatgattaccagcgcactgcatcgtgcggcggattgggcgaaaagcgtgttttctagtgctgcgctgggtgatccgcgtcgtaccgcgcgtctggtgaatgttgcggcgcaactggccaaatatagcggcaaaagcattaccattagcagcgaaggcagcaaagccatgcaggaaggcgcgtatcgttttattcgtaatccgaacgtgagcgcggaagcgattcgtaaagcgggtgccatgcagaccgtgaaactggcccaggaatttccggaactgctggcaattgaagataccacctctctgagctatcgtcatcaggtggcggaagaactgggcaaactgggtagcattcaggataaaagccgtggttggtgggtgcatagcgtgctgctgctggaagcgaccacctttcgtaccgtgggcctgctgcatcaagaatggtggatgcgtccggatgatccggcggatgcggatgaaaaagaaagcggcaaatggctggccgctgctgcaacttcgcgtctgagaatgggcagcatgatgagcaacgtgattgcggtgtgcgatcgtgaagcggatattcatgcgtatctgcaagataaactggcccataacgaacgttttgtggtgcgtagcaaacatccgcgtaaagatgtggaaagcggcctgtatctgtatgatcacctgaaaaaccagccggaactgggcggctatcagattagcattccgcagaaaggcgtggtggataaacgtggcaaacgtaaaaaccgtccggcgcgtaaagcgagcctgagcctgcgtagcggccgtattaccctgaaacagggcaacattaccctgaacgcggtgctggccgaagaaattaatccgccgaaaggcgaaaccccgctgaaatggctgctgctgaccagcgagccggtggaaagtctggcccaagcgctgcgtgtgattgatatttatacccatcgttggcgcattgaagaatttcacaaagcgtggaaaacgggtgcgggtgcggaacgtcagcgtatggaagaaccggataacctggaacgtatggtgagcattctgagctttgtggcggtgcgtctgctgcaactgcgtgaatcttttactccgccgcaagcactgcgtgcgcagggcctgctgaaagaagcggaacacgttgaaagccagagcgcggaaaccgtgctgaccccggatgaatgccaactgctgggctatctggataaaggcaaacgcaaacgcaaagaaaaagcgggcagcctgcaatgggcgtatatggcgattgcgcgtctgggcggctttatggatagcaaacgtaccggcattgcgagctggggtgcgctgtgggaaggttgggaagcgctgcaaagcaaactggatggctttctggccgcgaaagacctgatggcgcagggcattaaaatctaaactagtcttttccgctgcataaccctgcttcggggtcattatagcgattttttcggtatatccatcctttttcgcacgatatacaggattttgccaaagggttcgtgtagactttccttggtgtatccaacggcgtcagccgggcaggataggtgaagtaggcccacccgcgagcgggtgttccttcttcactgtcccttattcgcacctggcggtgctcaacgggaatcctgctctgcgaggctggccgtaggccggccggcgcgccgatctgaagatcagcagttcaacctgttgatagtacgtactaagctctcatgtttcacgtactaagctctcatgtttaacgtactaagctctcatgtttaacgaactaaaccctcatggctaacgtactaagctctcatggctaacgtactaagctctcatgtttcacgtactaagctctcatgtttgaacaataaaattaatataaatcagcaacttaaatagcctctaaggttttaagttttataagaaaaaaaagaatatataaggcttttaaagcctttaaggtttaacggttgtggacaacaagccagggatgtaacgcactgagaagcccttagagcctctcaaagcaattttgagtgacacaggaacacttaacggctgacatgg

SEQ ID NO: 148 - DNA, 13779 bp, Artificial Sequence
  plasmid pGRG36-pir
ggccacgatgcgtccggcgtagaggatctgctcatgtttgacagcttatcatcgatgcataatgtgcctgtcaaatggacgaagcagggattctgcaaaccctatgctactccgtcaagccgtcaattgtctgattcgttaccaattatgacaacttgacggctacatcattcactttttcttcacaaccggcacggaactcgctcgggctggccccggtgcattttttaaatacccgcgagaaatagagttgatcgtcaaaaccaacattgcgaccgacggtggcgataggcatccgggtggtgctcaaaagcagcttcgcctggctgatacgttggtcctcgcgccagcttaagacgctaatccctaactgctggcggaaaagatgtgacagacgcgacggcgacaagcaaacatgctgtgcgacgctggcgatatcaaaattgctgtctgccaggtgatcgctgatgtactgacaagcctcgcgtacccgattatccatcggtggatggagcgactcgttaatcgcttccatgcgccgcagtaacaattgctcaagcagatttatcgccagcagctccgaatagcgcccttccccttgcccggcgttaatgatttgcccaaacaggtcgctgaaatgcggctggtgcgcttcatccgggcgaaagaaccccgtattggcaaatattgacggccagttaagccattcatgccagtaggcgcgcggacgaaagtaaacccactggtgataccattcgcgagcctccggatgacgaccgtagtgatgaatctctcctggcgggaacagcaaaatatcacccggtcggcaaacaaattctcgtccctgatttttcaccaccccctgaccgcgaatggtgagattgagaatataacctttcattcccagcggtcggtcgataaaaaaatcgagataaccgttggcctcaatcggcgttaaacccgccaccagatgggcattaaacgagtatcccggcagcaggggatcattttgcgcttcagccatacttttcatactcccgccattcagagaagaaaccaattgtccatattgcatcagacattgccgtcactgcgtcttttactggctcttctcgctaaccaaaccggtaaccccgcttattaaaagcattctgtaacaaagcgggaccaaagccatgacaaaaacgcgtaacaaaagtgtctataatcacggcagaaaagtccacattgattatttgcacggcgtcacactttgctatgccatagcatttttatccataagattagcggatcctacctgacgctttttatcgcaactctctactgtttctccatacccgtttttttgggctagcgaattcgagctcggtacccaagtcttaaactagacagaatagttgtaaactgaaatcagtccagttatgctgtgaaaaagcatactggacttttgttatggctaaagcaaactcttcattttctgaagtgcaaattgcccgtcgtattaaagaggggcgtggccaagggcatggtaaagactatattccatggctaacagtacaagaagttccttcttcaggtcgttcccaccgtatttattctcataagacgggacgagtccatcatttgctatctgacttagagcttgctgtttttctcagtcttgagtgggagagcagcgtgctagatatacgcgagcagttccccttattacctagtgataccaggcagattgcaatagatagtggtattaagcatcctgttattcgtggtgtagatcaggttatgtctactgattttttagtggactgcaaagatggtccttttgagcagtttgctattcaagtcaaacctgcagcagccttacaagacgagcgtaccttagaaaaactagaactagagcgtcgctattggcagcaaaagcaaattccttggttcatttttactgataaagaaataaatcccgtagtaaaagaaaatattgaatggctttattcagtgaaaacagaagaagtttctgcggagcttttagcacaactatccccattggcccatatcctgcaagaaaaaggagatgaaaacattatcaatgtctgtaagcaggttgatattgcttatgatttggagttaggcaaaacattgagtgagatacgagccttaaccgcaaatggttttattaagttcaatatttataagtctttcagggcaaataagtgtgcagatctctgtattagccaagtagtgaatatggaggagttgcgctatgtggcaaattaatgaggttgtgctatttgataatgatccgtatcgcattttggctatagaggatggccaagttgtctggatgcaaataagcgctgataaaggagttccacaagctagggctgagttgttgctaatgcagtatttagatgaaggccgcttagttagaactgatgacccttatgtacatcttgatttagaagagccgtctgtagattctgtcagcttccagaagcgcgaggaggattatcgaaaaattcttcctattattaatagtaaggatcgtttcgaccctaaagtcagaagcgaactcgttgagcatgtggtccaagaacataaggttactaaggctacagtttataagttgttacgccgttactggcagcgtggtcaaacgcctaatgcattaattcctgactacaaaaacagcggtgcaccaggggaaagacgttcagcgacaggaacagcaaagattggccgagccagagaatatggtaagggtgaaggaaccaaggtaacgcccgagattgaacgcctttttaggttgaccatagaaaagcacctgttaaatcaaaaaggtacaaagaccaccgttgcctatagacgatttgtggacttgtttgctcagtattttcctcgcattccccaagaggattacccaacactacgtcagtttcgttatttttatgatcgagaataccctaaagctcagcgcttaaagtctagagttaaagcaggggtatataaaaaagacgtacgacccttaagtagtacagccacttctcaggcgttaggccctgggagtcgttatgagattgatgccacgattgctgatatttatttagtggatcatcatgatcgccaaaaaatcataggaagaccaacgctttacattgtgattgatgtgtttagtcggatgatcacgggcttttatatcggctttgaaaatccgtcttatgtggtggcgatgcaggcttttgtaaatgcttgctctgacaaaacggccatttgtgcccagcatgatattgagattagtagctcagactggccgtgtgtaggtttgccagatgtgttgctagcggaccgtggcgaattaatgagtcatcaggtcgaagccttagtttctagttttaatgtgcgagtggaaagtgctccacctagacgtggcgatgctaaaggcatagtggaaagcacttttagaacactacaagccgagtttaagtcctttgcacctggcattgtagagggcagtcggatcaaaagccatggtgaaacagactataggttagatgcatctctgtcggtatttgagttcacacaaattattttgcgtacgatcttattcagaaataaccatctggtgatggataaatacgatcgagatgctgattttcctacagatttaccgtctattcctgtccagctatggcaatggggtatgcagcatcgtacaggtagtttaagggctgtggagcaagagcagttgcgagtagcgttactgcctcgccgaaaggtctctatttcttcatttggcgttaatttgtggggtttgtattactcggggtcagagattctgcgtgagggttggttgcagcggagcactgatatagctagacctcaacatttagaagcggcttatgacccagtgctggttgatacgatttatttgtttccgcaagttggcagccgtgtattttggcgctgtaatctgacggaacgtagtcggcagtttaaaggtctctcattttgggaggtttgggatatacaagcacaagaaaaacacaataaagccaatgcgaagcaggatgagttaactaaacgcagggagcttgaggcgtttattcagcaaaccattcagaaagcgaataagttaacgcccagtactactgagcccaaatcaacacgcattaagcagattaaaactaataaaaaagaagccgtgacctcggagcgtaaaaaacgtgcggagcatttgaagccaagctcttcaggtgatgaggctaaagttattcctttcaacgcagtggaagcggatgatcaagaagattacagcctacccacatacgtgcctgaattatttcaggatccaccagaaaaggatgagtcatgagtgctacccggattcaagcagtttatcgtgatacgggggtagaggcttatcgtgataatccttttatcgaggccttaccaccattacaagagtcagtgaatagtgctgcatcactgaaatcctctttacagcttacttcctctgacttgcaaaagtcccgtgttatcagagctcataccatttgtcgtattccagatgactattttcagccattaggtacgcatttgctactaagtgagcgtatttcggtcatgattcgaggtggctacgtaggcagaaatcctaaaacaggagatttacaaaagcatttacaaaatggttatgagcgtgttcaaacgggagagttggagacatttcgctttgaggaggcacgatctacggcacaaagcttattgttaattggttgttctggtagtgggaagacgacctctcttcatcgtattctagccacgtatcctcaggtgatttaccatcgtgaactcaatgtagagcaggtggtgtatttgaaaatagactgctcgcataatggttcgctaaaagaaatctgcttgaattttttcagagcgttggatcgagccttgggctcgaactatgagcgtcgttatggcttaaaacgtcatggtatagaaaccatgttggctttgatgtcgcaaatagccaatgcacatgctttagggttgttggttattgatgaaattcagcatttaagccgctctcgttcgggtggatctcaagagatgctgaacttttttgtgacgatggtgaatattattggcgtaccagtgatgttgattggtacccctaaagcacgagagatttttgaggctgatttgcggtctgcacgtagaggggcagggtttggagctatattctgggatcctatacaacaaacgcaacgtggaaagcccaatcaagagtggatcgcttttacggataatctttggcaattacagcttttacaacgcaaagatgcgctgttatcggatgaggtccgtgatgtgtggtatgagctaagccaaggagtgatggacattgtagtaaaactttttgtactcgctcagctccgtgcgctagctttaggcaatgagcgtattaccgctggtttattgcggcaagtgtatcaagatgagttaaagcctgtgcaccccatgctagaggcattacgctcgggtatcccagaacgcattgctcgttattctgatctagtcgttcccgagattgataaacggttaatccaacttcagctagatatcgcagcgatacaagaacaaacaccagaagaaaaagcccttcaagagttagataccgaagatcagcgtcatttatatctgatgctgaaagaggattacgattcaagcctgttaattcccactattaaaaaagcgtttagccagaatccaacgatgacaagacaaaagttactgcctcttgttttgcagtggttgatggaaggcgaaacggtagtgtcagaactagaaaagccctccaagagtaaaaaggtttcggctataaaggtagtcaagcccagcgactgggatagcttgcctgatacggatttacgttatatctattcacaacgccaacctgaaaaaaccatgcatgaacggttaaaagggaaaggggtaatagtggatatggcgagcttatttaaacaagcaggttagccatgagaaactttcctgttccgtactcgaatgagctgatttatagcactattgcacgggcaggcgtttatcaagggattgttagtcctaagcagctgttggatgaggtgtatggcaaccgcaaggtggtcgctaccttaggtctgccctcgcatttaggtgtgatagcaagacatctacatcaaacaggacgttacgctgttcagcagcttatttatgagcataccttattccctttatatgctccgtttgtaggcaaggagcgccgagacgaagctattcggttaatggagtaccaagcgcaaggtgcggtgcatttaatgctaggagtcgctgcttctagagttaagagcgataaccgctttagatactgccctgattgcgttgctcttcagctaaataggtatggggaagccttttggcaacgagattggtatttgcccgctttgccatattgtccaaaacacggtgctttagtcttctttgatagagctgtagatgatcaccgacatcaattttgggctttgggtcatactgagctgctttcagactaccccaaagactccctatctcaattaacagcactagctgcttatatagcccctctgttagatgctccacgagcgcaagagctttccccaagccttgagcagtggacgctgttttatcagcgcttagcgcaggatctagggctaaccaaaagcaagcacattcgtcatgacttggtggcggagagagtgaggcagacttttagtgatgaggcactagagaaactggatttaaagttggcagagaacaaggacacgtgttggctgaaaagtatattccgtaagcatagaaaagcctttagttatttacagcatagtattgtgtggcaagccttattgccaaaactaacggttatagaagcgctacagcaggcaagtgctcttactgagcactctataacgacaagacctgttagccagtctgtgcaacctaactctgaagatttatctgttaagcataaagactggcagcaactagtgcataaataccaaggaattaaggcggcaagacagtctttagagggtggggtgctatacgcttggctttaccgacatgacagggattggctagttcactggaatcaacagcatcaacaagagcgtctggcacccgcccctagagttgattggaaccaaagagatcgaattgctgtacgacaactattaagaatcataaagcgtctagatagtagccttgatcacccaagagcgacatcgagctggctgttaaagcaaactcctaacggaacctctcttgcaaaaaatctacagaaactgcctttggtagcgctttgcttaaagcgttactcagagagtgtggaagattatcaaattagacggattagccaagcttttattaagcttaaacaggaagatgttgagcttaggcgctggcgattattaagaagtgcaacgttatctaaagagcggataactgaggaagcacaaagattcttggaaatggtttatggggaagagtgagtggttaggctagctacatttaatgacaatgtgcaggttgtacatattggtcatttattccgtaactcgggtcataaggagtggcgtatttttgtttggtttaatccaatgcaagaacggaaatggactcgatttactcatttgcctttattaagtcgagctaaggtggttaacagtacaacaaagcaaataaataaggcggatcgtgtgattgagtttgaagcatcggatcttcaacgagccaaaataatcgattttcctaatctctcgtcctttgcttccgtacgcaacaaggatggagcgcagagttcatttatttacgaagctgaaacaccatatagcaagactcgttatcacatcccacagttagagctagctcggtcattatttttaggggatcctctagagtcgacctgcaggcatgcaagcttggctgttttggcggatgagagaagattttcagcctgatacagattaaatcagaacgcagaagcggtctgataaaacagaatttgcctggcggcagtagcgcggtggtcccacctgaccccatgccgaactcagaagtgaaacgccgtagcgccgatggtagtgtggggtctccccatgcgagagtagggaactgccaggcatcaaataaaacgaaaggctcagtcgaaagactgggcctttcgttttatctgttgtttgtcggtgaacgctctcctgagtaggacaaatccgccgggagcggatttgaacgttgcgaagcaacggcccggagggtggcgggcaggacgcccgccataaactgccaggcatcaaattaagcagaaggccatcctgacggatggcctttttgcgtttctacaaactcttttgtttatttttctaaatacattcaaatatgtatccgctcatgagacaataaccctgataaatgcttcaataatattgaaaaaggaagagtatgagtattcaacatttccgtgtcgcccttattcccttttttgcggcattttgccttcctgtttttgctcacccagaaacgctggtgaaagtaaaagatgctgaagatcagttgggtgcacgagtgggttacatcgaactggatctcaacagcggtaagatccttgagagttttcgccccgaagaacgttttccaatgatgagcacttttaaagttctgctatgtggcgcggtattatcccgtgttgacgccgggcaagagcaactcggtcgccgcatacactattctcagaatgacttggttgagtactcaccagtcacagaaaagcatcttacggatggcatgacagtaagagaattatgcagtgctgccataaccatgagtgataacactgcggccaacttacttctgacaacgatcggaggaccgaaggagctaaccgcttttttgcacaacatgggggatcatgtaactcgccttgatcgttgggaaccggagctgaatgaagccataccaaacgacgagcgtgacaccacgatgcctgcagcaatggcaacaacgttgcgcaaactattaactggcgaactacttactctagcttcccggcaacaattaatagactggatggaggcggataaagttgcaggaccacttctgcgctcggcccttccggctggctggtttattgctgataaatctggagccggtgagcgtgggtctcgcggtatcattgcagcactggggccagatggtaagccctcccgtatcgtagttatctacacgacggggagtcaggcaactatggatgaacgaaatagacagatcgctgagataggtgcctcactgattaagcattggtaactgtcagaccaagtttactcatatatactttagattgatttacgcgccctgtagcggcgcattaagcgcggcgggtgtggtggttacgcgcagcgtgaccgctacacttgccagcgccctagcgcccgctcctttcgctttcttcccttcctttctcgccacgttcgccgccggccagcctcgcagagcaggattcccgttgagcaccgccaggtgcgaataagggacagtgaagaaggaacacccgctcgcgggtgggcctacttcacctatcctgcccggcggcatcaccggcgccacaggtgcggttgctggcgcctatatcgccgacatcaccgatggggaagatcgggctcgccacttcgggctcatgagcgcttgtttcggcgtgggtatggtggcaggccccgtggccgggggactgttgggcgccatctccttgcatgcaccattccttgcggcggcggtgctcaacggcctcaacctactactgggctgcttcctaatgcaggagtcgcataagggagagcgtcgatccccgacagtaagacgggtaagcctgttgatgataccgctgccttactgggtgcattagccagtctgaatgacctgtcacgggataatccgaagtggtcagactggaaaatcagagggcaggaactgctgaacagcaaaaagtcagatagcaccacatagcagacccgccataaaacgccctgagaagcccgtgacgggcttttcttgtattatgggtagtttccttgcatgaatccataaaaggcgcctgtagtgccatttacccccattcactgccagagccgtgagcgcagcgaactgaatgtcacgaaaaagacagcgactcaggtgcctgatggtcggagacaaaaggaatattcagcgatttgcccgagcttgcgagggtgctacttaagcctttagggttttaaggtctgttttgtagaggagcaaacagcgtttgcgacatccttttgtaatactgcggaactgactaaagtagtgagttatacacagggctgggatctattctttttatctttttttattctttctttattctataaattataaccacttgaatataaacaaaaaaaacacacaaaggtctagcggaatttacagagggtctagcagaatttacaagttttccagcaaaggtctagcagaatttacagatacccacaactcaaaggaaaaggactagtaattatcattgactagcccatctcaattggtatagtgattaaaatcacctagaccaattgagatgtatgtctgaattagttgttttcaaagcaaatgaactagcgattagtcgctatgacttaacggagcatgaaaccaagctaattttatgctgtgtggcactactcaaccccacgattgaaaaccctacaaggaaagaacggacggtatcgttcacttataaccaatacgttcagatgatgaacatcagtagggaaaatgcttatggtgtattagctaaagcaaccagagagctgatgacgagaactgtggaaatcaggaatcctttggttaaaggctttgagattttccagtggacaaactatgccaagttctcaagcgaaaaattagaattagtttttagtgaagagatattgccttatcttttccagttaaaaaaattcataaaatataatctggaacatgttaagtcttttgaaaacaaatactctatgaggatttatgagtggttattaaaagaactaacacaaaagaaaactcacaaggcaaatatagagattagccttgatgaatttaagttcatgttaatgcttgaaaataactaccatgagtttaaaaggcttaaccaatgggttttgaaaccaataagtaaagatttaaacacttacagcaatatgaaattggtggttgataagcgaggccgcccgactgatacgttgattttccaagttgaactagatagacaaatggatctcgtaaccgaacttgagaacaaccagataaaaatgaatggtgacaaaataccaacaaccattacatcagattcctacctacataacggactaagaaaaacactacacgatgctttaactgcaaaaattcagctcaccagttttgaggcaaaatttttgagtgacatgcaaagtaagtatgatctcaatggttcgttctcatggctcacgcaaaaacaacgaaccacactagagaacatactggctaaatacggaaggatctgaggttcttatggctcttgtatctatcagtgaagcatcaagactaacaaacaaaagtagaacaactgttcaccgttacatatcaaagggaaaactgtccatatgcacagatgaaaacggtgtaaaaaagatagatacatcagagcttttacgagtttttggtgcatttaaagctgttcaccatgaacagatcgacaatgtaacagatgaacagcatgtaacacctaatagaacaggtgaaaccagtaaaacaaagcaactagaacatgaaattgaacacctgagacaacttgttacagctcaacagtcacacatagacagcctgaaacaggcgatgctgcttatcgaatcaaagctgccgacaacacgggagccagtgacgcctcccgtggggaaaaaatcatggcaattctggaagaaatagcgctttcagcctgtgggcggacaaaatagttgggaactgggaggggtggaaatggagtttttaaggattatttagggaagagtgacaaaatagatgggaactgggtgtagcgtcgtaagctaatacgaaaattaaaaatgacaaaatagtttggaactagatttcacttatctggttggtcgacactagtattaccctgttatccctagatttaaatgatatcggatcctagtaagccacgttttaattaatcagatcccgggcatgagtggatagtacgttgctaaaacatgagataaaaattgactctcatgttattggcgttaagatatacagaatgatgaggtttttttatgagactcaaggtcatgatggacgtgaacaaaaaaacgaaaattcgccaccgaaacgagctaaatcacaccctggctcaacttcctttgcccgcaaagcgagtgatgtatatggcgcttgctcccattgatagcaaagaacctcttgaacgagggcgagttttcaaaattagggctgaagaccttgcagcgctcgccaaaatcaccccatcgcttgcttatcgacaattaaaagagggtggtaaattacttggtgccagcaaaatttcgctaagaggggatgatatcattgctttagctaaagagcttaacctgccctttactgctaaaaactcccctgaagagttagatcttaacattattgagtggatagcttattcaaatgatgaaggatacttgtctttaaaattcaccagaaccatagaaccatatatctctagccttattgggaaaaaaaataaattcacaacgcaattgttaacggcaagcttacgcttaagtagccagtattcatcttctctttatcaacttatcaggaagcattactctaattttaagaagaaaaattattttattatttccgttgatgagttaaaggaagagttaatagcttatacttttgataaagatggaaatattgagtacaaataccctgactttcctatttttaaaagggatgtgttaaataaagccattgctgaaattaaaaagaaaacagaaatatcgtttgttggcttcactgttcatgaaaaagaaggaagaaaaattagtaagctgaagttcgaatttgtcgttgatgaagatgaattttctggcgataaagatgatgaagctttttttatgaatttatctgaagctgatgcagcttttctcaaggtatttgatgaaaccgtacctcccaaaaaagctaaggggtgaccaagcctcgagatgcatggcgcctaacctaaactgacaggcatcaaattaagcagaaggccatcctgacggatggcctttttgcgtttcgaacaattgaaaaaacctcgcgccttacctgttgagtaatagtcaaaagcctccggtcggaggcttttgactttctgcttactgaatttcggtggtgccgttaattaaccggtgggccctcatgataataatggtttcttagacgtccctcgagcacctaggaggcgcgccacggccgcgtcgaccccacgcccctctttaatacgacgggcaatttgcacttcagaaaatgaagagtttgctttagccataacaaaagtccagtatgctttttcacagcataactggactgatttcagtttacaactattctgtctagtttaagactttattgtcatagtttagatctattttgttcagtttaagactttattgtccgcccaca

SEQ ID NO: 149 - DNA, 17905 bp, Artificial Sequence
  plasmid pGRG36-SmCm
ggccacgatgcgtccggcgtagaggatctgctcatgtttgacagcttatcatcgatgcataatgtgcctgtcaaatggacgaagcagggattctgcaaaccctatgctactccgtcaagccgtcaattgtctgattcgttaccaattatgacaacttgacggctacatcattcactttttcttcacaaccggcacggaactcgctcgggctggccccggtgcattttttaaatacccgcgagaaatagagttgatcgtcaaaaccaacattgcgaccgacggtggcgataggcatccgggtggtgctcaaaagcagcttcgcctggctgatacgttggtcctcgcgccagcttaagacgctaatccctaactgctggcggaaaagatgtgacagacgcgacggcgacaagcaaacatgctgtgcgacgctggcgatatcaaaattgctgtctgccaggtgatcgctgatgtactgacaagcctcgcgtacccgattatccatcggtggatggagcgactcgttaatcgcttccatgcgccgcagtaacaattgctcaagcagatttatcgccagcagctccgaatagcgcccttccccttgcccggcgttaatgatttgcccaaacaggtcgctgaaatgcggctggtgcgcttcatccgggcgaaagaaccccgtattggcaaatattgacggccagttaagccattcatgccagtaggcgcgcggacgaaagtaaacccactggtgataccattcgcgagcctccggatgacgaccgtagtgatgaatctctcctggcgggaacagcaaaatatcacccggtcggcaaacaaattctcgtccctgatttttcaccaccccctgaccgcgaatggtgagattgagaatataacctttcattcccagcggtcggtcgataaaaaaatcgagataaccgttggcctcaatcggcgttaaacccgccaccagatgggcattaaacgagtatcccggcagcaggggatcattttgcgcttcagccatacttttcatactcccgccattcagagaagaaaccaattgtccatattgcatcagacattgccgtcactgcgtcttttactggctcttctcgctaaccaaaccggtaaccccgcttattaaaagcattctgtaacaaagcgggaccaaagccatgacaaaaacgcgtaacaaaagtgtctataatcacggcagaaaagtccacattgattatttgcacggcgtcacactttgctatgccatagcatttttatccataagattagcggatcctacctgacgctttttatcgcaactctctactgtttctccatacccgtttttttgggctagcgaattcgagctcggtacccaagtcttaaactagacagaatagttgtaaactgaaatcagtccagttatgctgtgaaaaagcatactggacttttgttatggctaaagcaaactcttcattttctgaagtgcaaattgcccgtcgtattaaagaggggcgtggccaagggcatggtaaagactatattccatggctaacagtacaagaagttccttcttcaggtcgttcccaccgtatttattctcataagacgggacgagtccatcatttgctatctgacttagagcttgctgtttttctcagtcttgagtgggagagcagcgtgctagatatacgcgagcagttccccttattacctagtgataccaggcagattgcaatagatagtggtattaagcatcctgttattcgtggtgtagatcaggttatgtctactgattttttagtggactgcaaagatggtccttttgagcagtttgctattcaagtcaaacctgcagcagccttacaagacgagcgtaccttagaaaaactagaactagagcgtcgctattggcagcaaaagcaaattccttggttcatttttactgataaagaaataaatcccgtagtaaaagaaaatattgaatggctttattcagtgaaaacagaagaagtttctgcggagcttttagcacaactatccccattggcccatatcctgcaagaaaaaggagatgaaaacattatcaatgtctgtaagcaggttgatattgcttatgatttggagttaggcaaaacattgagtgagatacgagccttaaccgcaaatggttttattaagttcaatatttataagtctttcagggcaaataagtgtgcagatctctgtattagccaagtagtgaatatggaggagttgcgctatgtggcaaattaatgaggttgtgctatttgataatgatccgtatcgcattttggctatagaggatggccaagttgtctggatgcaaataagcgctgataaaggagttccacaagctagggctgagttgttgctaatgcagtatttagatgaaggccgcttagttagaactgatgacccttatgtacatcttgatttagaagagccgtctgtagattctgtcagcttccagaagcgcgaggaggattatcgaaaaattcttcctattattaatagtaaggatcgtttcgaccctaaagtcagaagcgaactcgttgagcatgtggtccaagaacataaggttactaaggctacagtttataagttgttacgccgttactggcagcgtggtcaaacgcctaatgcattaattcctgactacaaaaacagcggtgcaccaggggaaagacgttcagcgacaggaacagcaaagattggccgagccagagaatatggtaagggtgaaggaaccaaggtaacgcccgagattgaacgcctttttaggttgaccatagaaaagcacctgttaaatcaaaaaggtacaaagaccaccgttgcctatagacgatttgtggacttgtttgctcagtattttcctcgcattccccaagaggattacccaacactacgtcagtttcgttatttttatgatcgagaataccctaaagctcagcgcttaaagtctagagttaaagcaggggtatataaaaaagacgtacgacccttaagtagtacagccacttctcaggcgttaggccctgggagtcgttatgagattgatgccacgattgctgatatttatttagtggatcatcatgatcgccaaaaaatcataggaagaccaacgctttacattgtgattgatgtgtttagtcggatgatcacgggcttttatatcggctttgaaaatccgtcttatgtggtggcgatgcaggcttttgtaaatgcttgctctgacaaaacggccatttgtgcccagcatgatattgagattagtagctcagactggccgtgtgtaggtttgccagatgtgttgctagcggaccgtggcgaattaatgagtcatcaggtcgaagccttagtttctagttttaatgtgcgagtggaaagtgctccacctagacgtggcgatgctaaaggcatagtggaaagcacttttagaacactacaagccgagtttaagtcctttgcacctggcattgtagagggcagtcggatcaaaagccatggtgaaacagactataggttagatgcatctctgtcggtatttgagttcacacaaattattttgcgtacgatcttattcagaaataaccatctggtgatggataaatacgatcgagatgctgattttcctacagatttaccgtctattcctgtccagctatggcaatggggtatgcagcatcgtacaggtagtttaagggctgtggagcaagagcagttgcgagtagcgttactgcctcgccgaaaggtctctatttcttcatttggcgttaatttgtggggtttgtattactcggggtcagagattctgcgtgagggttggttgcagcggagcactgatatagctagacctcaacatttagaagcggcttatgacccagtgctggttgatacgatttatttgtttccgcaagttggcagccgtgtattttggcgctgtaatctgacggaacgtagtcggcagtttaaaggtctctcattttgggaggtttgggatatacaagcacaagaaaaacacaataaagccaatgcgaagcaggatgagttaactaaacgcagggagcttgaggcgtttattcagcaaaccattcagaaagcgaataagttaacgcccagtactactgagcccaaatcaacacgcattaagcagattaaaactaataaaaaagaagccgtgacctcggagcgtaaaaaacgtgcggagcatttgaagccaagctcttcaggtgatgaggctaaagttattcctttcaacgcagtggaagcggatgatcaagaagattacagcctacccacatacgtgcctgaattatttcaggatccaccagaaaaggatgagtcatgagtgctacccggattcaagcagtttatcgtgatacgggggtagaggcttatcgtgataatccttttatcgaggccttaccaccattacaagagtcagtgaatagtgctgcatcactgaaatcctctttacagcttacttcctctgacttgcaaaagtcccgtgttatcagagctcataccatttgtcgtattccagatgactattttcagccattaggtacgcatttgctactaagtgagcgtatttcggtcatgattcgaggtggctacgtaggcagaaatcctaaaacaggagatttacaaaagcatttacaaaatggttatgagcgtgttcaaacgggagagttggagacatttcgctttgaggaggcacgatctacggcacaaagcttattgttaattggttgttctggtagtgggaagacgacctctcttcatcgtattctagccacgtatcctcaggtgatttaccatcgtgaactcaatgtagagcaggtggtgtatttgaaaatagactgctcgcataatggttcgctaaaagaaatctgcttgaattttttcagagcgttggatcgagccttgggctcgaactatgagcgtcgttatggcttaaaacgtcatggtatagaaaccatgttggctttgatgtcgcaaatagccaatgcacatgctttagggttgttggttattgatgaaattcagcatttaagccgctctcgttcgggtggatctcaagagatgctgaacttttttgtgacgatggtgaatattattggcgtaccagtgatgttgattggtacccctaaagcacgagagatttttgaggctgatttgcggtctgcacgtagaggggcagggtttggagctatattctgggatcctatacaacaaacgcaacgtggaaagcccaatcaagagtggatcgcttttacggataatctttggcaattacagcttttacaacgcaaagatgcgctgttatcggatgaggtccgtgatgtgtggtatgagctaagccaaggagtgatggacattgtagtaaaactttttgtactcgctcagctccgtgcgctagctttaggcaatgagcgtattaccgctggtttattgcggcaagtgtatcaagatgagttaaagcctgtgcaccccatgctagaggcattacgctcgggtatcccagaacgcattgctcgttattctgatctagtcgttcccgagattgataaacggttaatccaacttcagctagatatcgcagcgatacaagaacaaacaccagaagaaaaagcccttcaagagttagataccgaagatcagcgtcatttatatctgatgctgaaagaggattacgattcaagcctgttaattcccactattaaaaaagcgtttagccagaatccaacgatgacaagacaaaagttactgcctcttgttttgcagtggttgatggaaggcgaaacggtagtgtcagaactagaaaagccctccaagagtaaaaaggtttcggctataaaggtagtcaagcccagcgactgggatagcttgcctgatacggatttacgttatatctattcacaacgccaacctgaaaaaaccatgcatgaacggttaaaagggaaaggggtaatagtggatatggcgagcttatttaaacaagcaggttagccatgagaaactttcctgttccgtactcgaatgagctgatttatagcactattgcacgggcaggcgtttatcaagggattgttagtcctaagcagctgttggatgaggtgtatggcaaccgcaaggtggtcgctaccttaggtctgccctcgcatttaggtgtgatagcaagacatctacatcaaacaggacgttacgctgttcagcagcttatttatgagcataccttattccctttatatgctccgtttgtaggcaaggagcgccgagacgaagctattcggttaatggagtaccaagcgcaaggtgcggtgcatttaatgctaggagtcgctgcttctagagttaagagcgataaccgctttagatactgccctgattgcgttgctcttcagctaaataggtatggggaagccttttggcaacgagattggtatttgcccgctttgccatattgtccaaaacacggtgctttagtcttctttgatagagctgtagatgatcaccgacatcaattttgggctttgggtcatactgagctgctttcagactaccccaaagactccctatctcaattaacagcactagctgcttatatagcccctctgttagatgctccacgagcgcaagagctttccccaagccttgagcagtggacgctgttttatcagcgcttagcgcaggatctagggctaaccaaaagcaagcacattcgtcatgacttggtggcggagagagtgaggcagacttttagtgatgaggcactagagaaactggatttaaagttggcagagaacaaggacacgtgttggctgaaaagtatattccgtaagcatagaaaagcctttagttatttacagcatagtattgtgtggcaagccttattgccaaaactaacggttatagaagcgctacagcaggcaagtgctcttactgagcactctataacgacaagacctgttagccagtctgtgcaacctaactctgaagatttatctgttaagcataaagactggcagcaactagtgcataaataccaaggaattaaggcggcaagacagtctttagagggtggggtgctatacgcttggctttaccgacatgacagggattggctagttcactggaatcaacagcatcaacaagagcgtctggcacccgcccctagagttgattggaaccaaagagatcgaattgctgtacgacaactattaagaatcataaagcgtctagatagtagccttgatcacccaagagcgacatcgagctggctgttaaagcaaactcctaacggaacctctcttgcaaaaaatctacagaaactgcctttggtagcgctttgcttaaagcgttactcagagagtgtggaagattatcaaattagacggattagccaagcttttattaagcttaaacaggaagatgttgagcttaggcgctggcgattattaagaagtgcaacgttatctaaagagcggataactgaggaagcacaaagattcttggaaatggtttatggggaagagtgagtggttaggctagctacatttaatgacaatgtgcaggttgtacatattggtcatttattccgtaactcgggtcataaggagtggcgtatttttgtttggtttaatccaatgcaagaacggaaatggactcgatttactcatttgcctttattaagtcgagctaaggtggttaacagtacaacaaagcaaataaataaggcggatcgtgtgattgagtttgaagcatcggatcttcaacgagccaaaataatcgattttcctaatctctcgtcctttgcttccgtacgcaacaaggatggagcgcagagttcatttatttacgaagctgaaacaccatatagcaagactcgttatcacatcccacagttagagctagctcggtcattatttttaggggatcctctagagtcgacctgcaggcatgcaagcttggctgttttggcggatgagagaagattttcagcctgatacagattaaatcagaacgcagaagcggtctgataaaacagaatttgcctggcggcagtagcgcggtggtcccacctgaccccatgccgaactcagaagtgaaacgccgtagcgccgatggtagtgtggggtctccccatgcgagagtagggaactgccaggcatcaaataaaacgaaaggctcagtcgaaagactgggcctttcgttttatctgttgtttgtcggtgaacgctctcctgagtaggacaaatccgccgggagcggatttgaacgttgcgaagcaacggcccggagggtggcgggcaggacgcccgccataaactgccaggcatcaaattaagcagaaggccatcctgacggatggcctttttgcgtttctacaaactcttttgtttatttttctaaatacattcaaatatgtatccgctcatgagacaataaccctgataaatgcttcaataatattgaaaaaggaagagtatgagtattcaacatttccgtgtcgcccttattcccttttttgcggcattttgccttcctgtttttgctcacccagaaacgctggtgaaagtaaaagatgctgaagatcagttgggtgcacgagtgggttacatcgaactggatctcaacagcggtaagatccttgagagttttcgccccgaagaacgttttccaatgatgagcacttttaaagttctgctatgtggcgcggtattatcccgtgttgacgccgggcaagagcaactcggtcgccgcatacactattctcagaatgacttggttgagtactcaccagtcacagaaaagcatcttacggatggcatgacagtaagagaattatgcagtgctgccataaccatgagtgataacactgcggccaacttacttctgacaacgatcggaggaccgaaggagctaaccgcttttttgcacaacatgggggatcatgtaactcgccttgatcgttgggaaccggagctgaatgaagccataccaaacgacgagcgtgacaccacgatgcctgcagcaatggcaacaacgttgcgcaaactattaactggcgaactacttactctagcttcccggcaacaattaatagactggatggaggcggataaagttgcaggaccacttctgcgctcggcccttccggctggctggtttattgctgataaatctggagccggtgagcgtgggtctcgcggtatcattgcagcactggggccagatggtaagccctcccgtatcgtagttatctacacgacggggagtcaggcaactatggatgaacgaaatagacagatcgctgagataggtgcctcactgattaagcattggtaactgtcagaccaagtttactcatatatactttagattgatttacgcgccctgtagcggcgcattaagcgcggcgggtgtggtggttacgcgcagcgtgaccgctacacttgccagcgccctagcgcccgctcctttcgctttcttcccttcctttctcgccacgttcgccgccggccagcctcgcagagcaggattcccgttgagcaccgccaggtgcgaataagggacagtgaagaaggaacacccgctcgcgggtgggcctacttcacctatcctgcccggcggcatcaccggcgccacaggtgcggttgctggcgcctatatcgccgacatcaccgatggggaagatcgggctcgccacttcgggctcatgagcgcttgtttcggcgtgggtatggtggcaggccccgtggccgggggactgttgggcgccatctccttgcatgcaccattccttgcggcggcggtgctcaacggcctcaacctactactgggctgcttcctaatgcaggagtcgcataagggagagcgtcgatccccgacagtaagacgggtaagcctgttgatgataccgctgccttactgggtgcattagccagtctgaatgacctgtcacgggataatccgaagtggtcagactggaaaatcagagggcaggaactgctgaacagcaaaaagtcagatagcaccacatagcagacccgccataaaacgccctgagaagcccgtgacgggcttttcttgtattatgggtagtttccttgcatgaatccataaaaggcgcctgtagtgccatttacccccattcactgccagagccgtgagcgcagcgaactgaatgtcacgaaaaagacagcgactcaggtgcctgatggtcggagacaaaaggaatattcagcgatttgcccgagcttgcgagggtgctacttaagcctttagggttttaaggtctgttttgtagaggagcaaacagcgtttgcgacatccttttgtaatactgcggaactgactaaagtagtgagttatacacagggctgggatctattctttttatctttttttattctttctttattctataaattataaccacttgaatataaacaaaaaaaacacacaaaggtctagcggaatttacagagggtctagcagaatttacaagttttccagcaaaggtctagcagaatttacagatacccacaactcaaaggaaaaggactagtaattatcattgactagcccatctcaattggtatagtgattaaaatcacctagaccaattgagatgtatgtctgaattagttgttttcaaagcaaatgaactagcgattagtcgctatgacttaacggagcatgaaaccaagctaattttatgctgtgtggcactactcaaccccacgattgaaaaccctacaaggaaagaacggacggtatcgttcacttataaccaatacgttcagatgatgaacatcagtagggaaaatgcttatggtgtattagctaaagcaaccagagagctgatgacgagaactgtggaaatcaggaatcctttggttaaaggctttgagattttccagtggacaaactatgccaagttctcaagcgaaaaattagaattagtttttagtgaagagatattgccttatcttttccagttaaaaaaattcataaaatataatctggaacatgttaagtcttttgaaaacaaatactctatgaggatttatgagtggttattaaaagaactaacacaaaagaaaactcacaaggcaaatatagagattagccttgatgaatttaagttcatgttaatgcttgaaaataactaccatgagtttaaaaggcttaaccaatgggttttgaaaccaataagtaaagatttaaacacttacagcaatatgaaattggtggttgataagcgaggccgcccgactgatacgttgattttccaagttgaactagatagacaaatggatctcgtaaccgaacttgagaacaaccagataaaaatgaatggtgacaaaataccaacaaccattacatcagattcctacctacataacggactaagaaaaacactacacgatgctttaactgcaaaaattcagctcaccagttttgaggcaaaatttttgagtgacatgcaaagtaagtatgatctcaatggttcgttctcatggctcacgcaaaaacaacgaaccacactagagaacatactggctaaatacggaaggatctgaggttcttatggctcttgtatctatcagtgaagcatcaagactaacaaacaaaagtagaacaactgttcaccgttacatatcaaagggaaaactgtccatatgcacagatgaaaacggtgtaaaaaagatagatacatcagagcttttacgagtttttggtgcatttaaagctgttcaccatgaacagatcgacaatgtaacagatgaacagcatgtaacacctaatagaacaggtgaaaccagtaaaacaaagcaactagaacatgaaattgaacacctgagacaacttgttacagctcaacagtcacacatagacagcctgaaacaggcgatgctgcttatcgaatcaaagctgccgacaacacgggagccagtgacgcctcccgtggggaaaaaatcatggcaattctggaagaaatagcgctttcagcctgtgggcggacaaaatagttgggaactgggaggggtggaaatggagtttttaaggattatttagggaagagtgacaaaatagatgggaactgggtgtagcgtcgtaagctaatacgaaaattaaaaatgacaaaatagtttggaactagatttcacttatctggttggtcgacactagtattaccctgttatccctagatttaaatgatatcggatcctagtaagccacgttttaattaatcagatcccgggctagtatgacgtctgtcgcacctgcttgatcgcggccgcgatagctagatcgcgttgctcctcttctccatccgcgttccaagctgcggaaaggcacccataagcgtacgcctggtcgagcaggcgacgcggatcgacgtccagcgcacgagagaatgcgtccgccatctgtgcaatgcgtctaggatcgagacaaaggtcgtctctgtcagccggatcgtagaacatattggcggcgccaaagcccacttcaccgaccagaccgacgggatctatcaccagccagccgcgactggagaacatgatgttttcatgatgcagatcgccatgtagcccacgcagttccgaggcattgctcatcatttgatcggctataatcgccgcgtggacgtagtcagtttgacaacctgcgttttgatcatcgcgcgcccgctgaaacaaagctgcaaagcgatcccggatcgggagaagggcagaaggcaggggttcctcagatgcggcatacagcttcgccattagttccgctgcaatttcggtcgcctggtagtcgccgtgctcggcaacgatgtgagagagcattcgctccccggcatattcgagcaacatcagattgttctcacgaccgagcaaccggactgctcccctcccattgcgccataccagatagtcggccccgcgcagttcatcagcaatgtcttctataggtttcaatcccttgacgattgcaggagtcccgtctggcaatgaaactttccaaacgaggctggaaaaggtgtccgcaatgagaacaggttgcgaaacgtgccaatgagcaggaaaaacaggcggcatgaacatcaaccccaagtcagagggtccaatcgcagatagaaggcaaggcgttcgcggtcgggggcttcgatccccaatacattgaataggacagcgaaggcgcgctctgcttcatctggcgctgcccagttctcttcggcgttagcaatcatgagtgccaaatcggcatagcgatctgctgttccgagccgcccaaggtcgatcagacccgtgcattgaagagttttagggtccaccatgaagttcggcatgcagggatcaccatggcaaacaaccatatcggtgcgctcttggtcgagccgcaccggtagctctcgttcgacacgagccaaaagatcgagctgcggcgtactcttgtcctcgtccggtaagaagtcgggattgacggcattgcgggacaccacatcaacggcgcgtccgaacattcgcgacagcctgcgctcaaacggacattgatcaaccgataggctgtgaacagcgccaagttgctgccccattgacggccacgctttgagcaaatccgctccagacagatcagccgccggtactcccggaattgccgttatcaccaagcatgcaccctcctgttcctcctgccagttgatgacctcggggcaagccacacctcgacctttgagccaaatgaggcggtcacgctctccagcgagctcaccgcggcgggaagcaggtgcgattttcgcgaaggcatgcccgtcaccacgtcgaaaaacaaaatcaccagattctccgcctctgacaggcaaccagtcagaatgcgattcaccaaaaaaaatattagttcgattcaataatatatacctcttaattttcaaagctagcataatacctaggactgagctagctgtaaacgttgacaccatcgaatggtgcaaaacctttcgcggtatggcatgatagcgcccggaagagagtcaattcagggtggtgaatgtgaaaccagtaacgttatacgatgtcgcagagtatgccggtgtctcttatcagaccgtttcccgcgtggtgaaccaggccagccacgtttctgcgaaaacgcgggaaaaagtggaagcggcgatggcggagctgaattacattcccaaccgcgtggcacaacaactggcgggcaaacagtcgttgctgattggcgttgccacctccagtctggccctgcacgcgccgtcgcaaattgtcgcggcgattaaatctcgcgccgatcaactgggtgccagcgtggtggtgtcgatggtagaacgaagcggcgtcgaagcctgtaaagcggcggtgcacaatcttctcgcgcaacgcgtcagtgggctgatcattaactatccgctggatgaccaggatgccattgctgtggaagctgcctgcactaatgttccggcgttatttcttgatgtctctgaccagacacccatcaacagtattattttctcccatgaagacggtacgcgactgggcgtggagcatctggtcgcattgggtcaccagcaaatcgcgctgttagcgggcccattaagttctgtctcggcgcgtctgcgtctggctggctggcataaatatctcactcgcaatcaaattcagccgatagcggaacgggaaggcgactggagtgccatgtccggttttcaacaaaccatgcaaatgctgaatgagggcatcgttcccactgcgatgctggttgccaacgatcagatggcgctgggcgcaatgcgcgccattaccgagtccgggctgcgcgttggtgcggatatctcggtagtgggatacgacgataccgaagacagctcatgttatatcccgccgtcaaccaccatcaaacaggattttcgcctgctggggcaaaccagcgtggaccgcttgctgcaactctctcagggccaggcggtgaagggcaatcagctgttgcccgtctcactggtgaaaagaaaaaccaccctggcgcccaatacgcaaaccgcctctccccgcgcgttggccgattcattaatgcagctggcacgacaggtttcccgactggaaagcgggcagtgagcgcaacgcaattaatgtgagttagcgcgaattgatctggtttgacagcttatcatcgactgcacggtgcaccaatgcttctggcgtcaggcagccatcggaagctgtggtatggctgtgcaggtcgtaaatcactgcataattcgtgtcgctcaaggcgcactcccgttctggataatgttttttgcgccgacatcataacggttctggcaaatattctgaaatgagctgttgacaattaatcatccggctcgtataatgtgtggaattgtgagcggataacaatttcacacaggaaacagcgccgctgagaaaaagcgaagcggcactgctctttaacaatttatcagacaatctgtgtgggcactcgaccggaattatcgattaactttattattaaaaattaaagaggtatatattaatggtttctaaaggagaagaaaaaaatatggcaagtttaccagcaacacatgagctacatatctttggttcaataaacggtgtagattttgatatggttggtcaaggaacaggaaatcctaacgatggttacgaagaattaaatttaaaatcaacaaaaggtgatttacaattttctccatggattttagtacctcacattggatatggttttcatcaatacttaccatatcctgatggtatgagtcctttccaagctgctatggttgatggttctgggtatcaagttcatagaacaatgcaattcgaagatggagcatctttaactgttaattacaggtatacgtacgagggatcacatattaaaggagaagctcaagttaaaggtactggttttcctgcagatggtccagttatgactaattccttaactgcagcagattggtgcagaagtaaaaagacataccctaatgataaaacaattatttcaacttttaaatggtcatatactacaggtaacggaaaaagatatagaagtacagcaagaacaacttatacttttgctaagccaatggcagctaattatttaaaaaatcaaccaatgtatgtttttagaaaaacagaattaaaacacagtaaaacagaattgaattttaaagaatggcaaaaagcatttacagatgttatgggaatggatgaattatataaataacctacgggaggcagcagttgaaagaggtgatcgactagaacgagattctgtagcgtagctgagcgtagggccgcgaggcgacctagagctgcattgaaaacaccattagcacctagacccatgcgacctagtggattctgctgcagagcgcggtggagcagatggcgaacacagtcaacgagtagtggatcgcccattaggaccacggcattaacgaggagcgcgaggatcagggcgagcgcatgagctagacccatgcgacctagagcccggaatgcatcggtatctgcctgtatgagaaaattctgctgagctaggaagtgattctgtagggcgaacgcatgagctagtggattacccattagatgattggccatacctagagcacccgcgagcacggcacccattaggcgaacgatcagagcagcattctgctgtagaacaggattagataccctggtagtcctgcaggcatgcctcgagttgatcgggcacgtaagaggttccaactttcaccataatgaaataagatcactaccgggcgtattttttgagttatcgagattttcaggagctaaggaagctaaaatggagaaaaaaatcactggatataccaccgttgatatatcccaatggcatcgtaaagaacattttgaggcatttcagtcagttgctcaatgtacctataaccagaccgttcagctggatattacggcctttttaaagaccgtaaagaaaaataagcacaagttttatccggcctttattcacattcttgcccgcctgatgaatgctcatccggaatttcgtatggcaatgaaagacggtgagctggtgatatgggatagtgttcacccttgttacaccgttttccatgagcaaactgaaacgttttcatcgctctggagtgaataccacgacgatttccggcagtttctacacatatattcgcaagatgtggcgtgttacggtgaaaacctggcctatttccctaaagggtttattgagaatatgtttttcgtctcagccaatccctgggtgagtttcaccagttttgatttaaacgtggccaatatggacaacttcttcgcccccgttttcaccatgggcaaatattatacgcaaggcgacaaggtgctgatgccgctggcgattcaggttcatcatgccgtttgtgatggcttccatgtcggcagaatgcttaatgaattacaacagtactgcgatgagtggcagggcggggcgtaatttgatatcgagctcgcttggactcctgttgatagatccagtaatgacctcagaactccatctggatttgttcagaacgctcggttgccgccgggcgttttttattggtgagaatccaagcctcgagctcgagcacctaggaggcgcgccacggccgcgtcgaccccacgcccctctttaatacgacgggcaatttgcacttcagaaaatgaagagtttgctttagccataacaaaagtccagtatgctttttcacagcataactggactgatttcagtttacaactattctgtctagtttaagactttattgtcatagtttagatctattttgttcagtttaagactttattgtccgcccaca

SEQ ID NO: 150 - DNA, 14262 bp, Artificial Sequence
  plasmid pGRG36-SmSp
ggccacgatgcgtccggcgtagaggatctgctcatgtttgacagcttatcatcgatgcataatgtgcctgtcaaatggacgaagcagggattctgcaaaccctatgctactccgtcaagccgtcaattgtctgattcgttaccaattatgacaacttgacggctacatcattcactttttcttcacaaccggcacggaactcgctcgggctggccccggtgcattttttaaatacccgcgagaaatagagttgatcgtcaaaaccaacattgcgaccgacggtggcgataggcatccgggtggtgctcaaaagcagcttcgcctggctgatacgttggtcctcgcgccagcttaagacgctaatccctaactgctggcggaaaagatgtgacagacgcgacggcgacaagcaaacatgctgtgcgacgctggcgatatcaaaattgctgtctgccaggtgatcgctgatgtactgacaagcctcgcgtacccgattatccatcggtggatggagcgactcgttaatcgcttccatgcgccgcagtaacaattgctcaagcagatttatcgccagcagctccgaatagcgcccttccccttgcccggcgttaatgatttgcccaaacaggtcgctgaaatgcggctggtgcgcttcatccgggcgaaagaaccccgtattggcaaatattgacggccagttaagccattcatgccagtaggcgcgcggacgaaagtaaacccactggtgataccattcgcgagcctccggatgacgaccgtagtgatgaatctctcctggcgggaacagcaaaatatcacccggtcggcaaacaaattctcgtccctgatttttcaccaccccctgaccgcgaatggtgagattgagaatataacctttcattcccagcggtcggtcgataaaaaaatcgagataaccgttggcctcaatcggcgttaaacccgccaccagatgggcattaaacgagtatcccggcagcaggggatcattttgcgcttcagccatacttttcatactcccgccattcagagaagaaaccaattgtccatattgcatcagacattgccgtcactgcgtcttttactggctcttctcgctaaccaaaccggtaaccccgcttattaaaagcattctgtaacaaagcgggaccaaagccatgacaaaaacgcgtaacaaaagtgtctataatcacggcagaaaagtccacattgattatttgcacggcgtcacactttgctatgccatagcatttttatccataagattagcggatcctacctgacgctttttatcgcaactctctactgtttctccatacccgtttttttgggctagcgaattcgagctcggtacccaagtcttaaactagacagaatagttgtaaactgaaatcagtccagttatgctgtgaaaaagcatactggacttttgttatggctaaagcaaactcttcattttctgaagtgcaaattgcccgtcgtattaaagaggggcgtggccaagggcatggtaaagactatattccatggctaacagtacaagaagttccttcttcaggtcgttcccaccgtatttattctcataagacgggacgagtccatcatttgctatctgacttagagcttgctgtttttctcagtcttgagtgggagagcagcgtgctagatatacgcgagcagttccccttattacctagtgataccaggcagattgcaatagatagtggtattaagcatcctgttattcgtggtgtagatcaggttatgtctactgattttttagtggactgcaaagatggtccttttgagcagtttgctattcaagtcaaacctgcagcagccttacaagacgagcgtaccttagaaaaactagaactagagcgtcgctattggcagcaaaagcaaattccttggttcatttttactgataaagaaataaatcccgtagtaaaagaaaatattgaatggctttattcagtgaaaacagaagaagtttctgcggagcttttagcacaactatccccattggcccatatcctgcaagaaaaaggagatgaaaacattatcaatgtctgtaagcaggttgatattgcttatgatttggagttaggcaaaacattgagtgagatacgagccttaaccgcaaatggttttattaagttcaatatttataagtctttcagggcaaataagtgtgcagatctctgtattagccaagtagtgaatatggaggagttgcgctatgtggcaaattaatgaggttgtgctatttgataatgatccgtatcgcattttggctatagaggatggccaagttgtctggatgcaaataagcgctgataaaggagttccacaagctagggctgagttgttgctaatgcagtatttagatgaaggccgcttagttagaactgatgacccttatgtacatcttgatttagaagagccgtctgtagattctgtcagcttccagaagcgcgaggaggattatcgaaaaattcttcctattattaatagtaaggatcgtttcgaccctaaagtcagaagcgaactcgttgagcatgtggtccaagaacataaggttactaaggctacagtttataagttgttacgccgttactggcagcgtggtcaaacgcctaatgcattaattcctgactacaaaaacagcggtgcaccaggggaaagacgttcagcgacaggaacagcaaagattggccgagccagagaatatggtaagggtgaaggaaccaaggtaacgcccgagattgaacgcctttttaggttgaccatagaaaagcacctgttaaatcaaaaaggtacaaagaccaccgttgcctatagacgatttgtggacttgtttgctcagtattttcctcgcattccccaagaggattacccaacactacgtcagtttcgttatttttatgatcgagaataccctaaagctcagcgcttaaagtctagagttaaagcaggggtatataaaaaagacgtacgacccttaagtagtacagccacttctcaggcgttaggccctgggagtcgttatgagattgatgccacgattgctgatatttatttagtggatcatcatgatcgccaaaaaatcataggaagaccaacgctttacattgtgattgatgtgtttagtcggatgatcacgggcttttatatcggctttgaaaatccgtcttatgtggtggcgatgcaggcttttgtaaatgcttgctctgacaaaacggccatttgtgcccagcatgatattgagattagtagctcagactggccgtgtgtaggtttgccagatgtgttgctagcggaccgtggcgaattaatgagtcatcaggtcgaagccttagtttctagttttaatgtgcgagtggaaagtgctccacctagacgtggcgatgctaaaggcatagtggaaagcacttttagaacactacaagccgagtttaagtcctttgcacctggcattgtagagggcagtcggatcaaaagccatggtgaaacagactataggttagatgcatctctgtcggtatttgagttcacacaaattattttgcgtacgatcttattcagaaataaccatctggtgatggataaatacgatcgagatgctgattttcctacagatttaccgtctattcctgtccagctatggcaatggggtatgcagcatcgtacaggtagtttaagggctgtggagcaagagcagttgcgagtagcgttactgcctcgccgaaaggtctctatttcttcatttggcgttaatttgtggggtttgtattactcggggtcagagattctgcgtgagggttggttgcagcggagcactgatatagctagacctcaacatttagaagcggcttatgacccagtgctggttgatacgatttatttgtttccgcaagttggcagccgtgtattttggcgctgtaatctgacggaacgtagtcggcagtttaaaggtctctcattttgggaggtttgggatatacaagcacaagaaaaacacaataaagccaatgcgaagcaggatgagttaactaaacgcagggagcttgaggcgtttattcagcaaaccattcagaaagcgaataagttaacgcccagtactactgagcccaaatcaacacgcattaagcagattaaaactaataaaaaagaagccgtgacctcggagcgtaaaaaacgtgcggagcatttgaagccaagctcttcaggtgatgaggctaaagttattcctttcaacgcagtggaagcggatgatcaagaagattacagcctacccacatacgtgcctgaattatttcaggatccaccagaaaaggatgagtcatgagtgctacccggattcaagcagtttatcgtgatacgggggtagaggcttatcgtgataatccttttatcgaggccttaccaccattacaagagtcagtgaatagtgctgcatcactgaaatcctctttacagcttacttcctctgacttgcaaaagtcccgtgttatcagagctcataccatttgtcgtattccagatgactattttcagccattaggtacgcatttgctactaagtgagcgtatttcggtcatgattcgaggtggctacgtaggcagaaatcctaaaacaggagatttacaaaagcatttacaaaatggttatgagcgtgttcaaacgggagagttggagacatttcgctttgaggaggcacgatctacggcacaaagcttattgttaattggttgttctggtagtgggaagacgacctctcttcatcgtattctagccacgtatcctcaggtgatttaccatcgtgaactcaatgtagagcaggtggtgtatttgaaaatagactgctcgcataatggttcgctaaaagaaatctgcttgaattttttcagagcgttggatcgagccttgggctcgaactatgagcgtcgttatggcttaaaacgtcatggtatagaaaccatgttggctttgatgtcgcaaatagccaatgcacatgctttagggttgttggttattgatgaaattcagcatttaagccgctctcgttcgggtggatctcaagagatgctgaacttttttgtgacgatggtgaatattattggcgtaccagtgatgttgattggtacccctaaagcacgagagatttttgaggctgatttgcggtctgcacgtagaggggcagggtttggagctatattctgggatcctatacaacaaacgcaacgtggaaagcccaatcaagagtggatcgcttttacggataatctttggcaattacagcttttacaacgcaaagatgcgctgttatcggatgaggtccgtgatgtgtggtatgagctaagccaaggagtgatggacattgtagtaaaactttttgtactcgctcagctccgtgcgctagctttaggcaatgagcgtattaccgctggtttattgcggcaagtgtatcaagatgagttaaagcctgtgcaccccatgctagaggcattacgctcgggtatcccagaacgcattgctcgttattctgatctagtcgttcccgagattgataaacggttaatccaacttcagctagatatcgcagcgatacaagaacaaacaccagaagaaaaagcccttcaagagttagataccgaagatcagcgtcatttatatctgatgctgaaagaggattacgattcaagcctgttaattcccactattaaaaaagcgtttagccagaatccaacgatgacaagacaaaagttactgcctcttgttttgcagtggttgatggaaggcgaaacggtagtgtcagaactagaaaagccctccaagagtaaaaaggtttcggctataaaggtagtcaagcccagcgactgggatagcttgcctgatacggatttacgttatatctattcacaacgccaacctgaaaaaaccatgcatgaacggttaaaagggaaaggggtaatagtggatatggcgagcttatttaaacaagcaggttagccatgagaaactttcctgttccgtactcgaatgagctgatttatagcactattgcacgggcaggcgtttatcaagggattgttagtcctaagcagctgttggatgaggtgtatggcaaccgcaaggtggtcgctaccttaggtctgccctcgcatttaggtgtgatagcaagacatctacatcaaacaggacgttacgctgttcagcagcttatttatgagcataccttattccctttatatgctccgtttgtaggcaaggagcgccgagacgaagctattcggttaatggagtaccaagcgcaaggtgcggtgcatttaatgctaggagtcgctgcttctagagttaagagcgataaccgctttagatactgccctgattgcgttgctcttcagctaaataggtatggggaagccttttggcaacgagattggtatttgcccgctttgccatattgtccaaaacacggtgctttagtcttctttgatagagctgtagatgatcaccgacatcaattttgggctttgggtcatactgagctgctttcagactaccccaaagactccctatctcaattaacagcactagctgcttatatagcccctctgttagatgctccacgagcgcaagagctttccccaagccttgagcagtggacgctgttttatcagcgcttagcgcaggatctagggctaaccaaaagcaagcacattcgtcatgacttggtggcggagagagtgaggcagacttttagtgatgaggcactagagaaactggatttaaagttggcagagaacaaggacacgtgttggctgaaaagtatattccgtaagcatagaaaagcctttagttatttacagcatagtattgtgtggcaagccttattgccaaaactaacggttatagaagcgctacagcaggcaagtgctcttactgagcactctataacgacaagacctgttagccagtctgtgcaacctaactctgaagatttatctgttaagcataaagactggcagcaactagtgcataaataccaaggaattaaggcggcaagacagtctttagagggtggggtgctatacgcttggctttaccgacatgacagggattggctagttcactggaatcaacagcatcaacaagagcgtctggcacccgcccctagagttgattggaaccaaagagatcgaattgctgtacgacaactattaagaatcataaagcgtctagatagtagccttgatcacccaagagcgacatcgagctggctgttaaagcaaactcctaacggaacctctcttgcaaaaaatctacagaaactgcctttggtagcgctttgcttaaagcgttactcagagagtgtggaagattatcaaattagacggattagccaagcttttattaagcttaaacaggaagatgttgagcttaggcgctggcgattattaagaagtgcaacgttatctaaagagcggataactgaggaagcacaaagattcttggaaatggtttatggggaagagtgagtggttaggctagctacatttaatgacaatgtgcaggttgtacatattggtcatttattccgtaactcgggtcataaggagtggcgtatttttgtttggtttaatccaatgcaagaacggaaatggactcgatttactcatttgcctttattaagtcgagctaaggtggttaacagtacaacaaagcaaataaataaggcggatcgtgtgattgagtttgaagcatcggatcttcaacgagccaaaataatcgattttcctaatctctcgtcctttgcttccgtacgcaacaaggatggagcgcagagttcatttatttacgaagctgaaacaccatatagcaagactcgttatcacatcccacagttagagctagctcggtcattatttttaggggatcctctagagtcgacctgcaggcatgcaagcttggctgttttggcggatgagagaagattttcagcctgatacagattaaatcagaacgcagaagcggtctgataaaacagaatttgcctggcggcagtagcgcggtggtcccacctgaccccatgccgaactcagaagtgaaacgccgtagcgccgatggtagtgtggggtctccccatgcgagagtagggaactgccaggcatcaaataaaacgaaaggctcagtcgaaagactgggcctttcgttttatctgttgtttgtcggtgaacgctctcctgagtaggacaaatccgccgggagcggatttgaacgttgcgaagcaacggcccggagggtggcgggcaggacgcccgccataaactgccaggcatcaaattaagcagaaggccatcctgacggatggcctttttgcgtttctacaaactcttttgtttatttttctaaatacattcaaatatgtatccgctcatgagacaataaccctgataaatgcttcaataatattgaaaaaggaagagtatgagtattcaacatttccgtgtcgcccttattcccttttttgcggcattttgccttcctgtttttgctcacccagaaacgctggtgaaagtaaaagatgctgaagatcagttgggtgcacgagtgggttacatcgaactggatctcaacagcggtaagatccttgagagttttcgccccgaagaacgttttccaatgatgagcacttttaaagttctgctatgtggcgcggtattatcccgtgttgacgccgggcaagagcaactcggtcgccgcatacactattctcagaatgacttggttgagtactcaccagtcacagaaaagcatcttacggatggcatgacagtaagagaattatgcagtgctgccataaccatgagtgataacactgcggccaacttacttctgacaacgatcggaggaccgaaggagctaaccgcttttttgcacaacatgggggatcatgtaactcgccttgatcgttgggaaccggagctgaatgaagccataccaaacgacgagcgtgacaccacgatgcctgcagcaatggcaacaacgttgcgcaaactattaactggcgaactacttactctagcttcccggcaacaattaatagactggatggaggcggataaagttgcaggaccacttctgcgctcggcccttccggctggctggtttattgctgataaatctggagccggtgagcgtgggtctcgcggtatcattgcagcactggggccagatggtaagccctcccgtatcgtagttatctacacgacggggagtcaggcaactatggatgaacgaaatagacagatcgctgagataggtgcctcactgattaagcattggtaactgtcagaccaagtttactcatatatactttagattgatttacgcgccctgtagcggcgcattaagcgcggcgggtgtggtggttacgcgcagcgtgaccgctacacttgccagcgccctagcgcccgctcctttcgctttcttcccttcctttctcgccacgttcgccgccggccagcctcgcagagcaggattcccgttgagcaccgccaggtgcgaataagggacagtgaagaaggaacacccgctcgcgggtgggcctacttcacctatcctgcccggcggcatcaccggcgccacaggtgcggttgctggcgcctatatcgccgacatcaccgatggggaagatcgggctcgccacttcgggctcatgagcgcttgtttcggcgtgggtatggtggcaggccccgtggccgggggactgttgggcgccatctccttgcatgcaccattccttgcggcggcggtgctcaacggcctcaacctactactgggctgcttcctaatgcaggagtcgcataagggagagcgtcgatccccgacagtaagacgggtaagcctgttgatgataccgctgccttactgggtgcattagccagtctgaatgacctgtcacgggataatccgaagtggtcagactggaaaatcagagggcaggaactgctgaacagcaaaaagtcagatagcaccacatagcagacccgccataaaacgccctgagaagcccgtgacgggcttttcttgtattatgggtagtttccttgcatgaatccataaaaggcgcctgtagtgccatttacccccattcactgccagagccgtgagcgcagcgaactgaatgtcacgaaaaagacagcgactcaggtgcctgatggtcggagacaaaaggaatattcagcgatttgcccgagcttgcgagggtgctacttaagcctttagggttttaaggtctgttttgtagaggagcaaacagcgtttgcgacatccttttgtaatactgcggaactgactaaagtagtgagttatacacagggctgggatctattctttttatctttttttattctttctttattctataaattataaccacttgaatataaacaaaaaaaacacacaaaggtctagcggaatttacagagggtctagcagaatttacaagttttccagcaaaggtctagcagaatttacagatacccacaactcaaaggaaaaggactagtaattatcattgactagcccatctcaattggtatagtgattaaaatcacctagaccaattgagatgtatgtctgaattagttgttttcaaagcaaatgaactagcgattagtcgctatgacttaacggagcatgaaaccaagctaattttatgctgtgtggcactactcaaccccacgattgaaaaccctacaaggaaagaacggacggtatcgttcacttataaccaatacgttcagatgatgaacatcagtagggaaaatgcttatggtgtattagctaaagcaaccagagagctgatgacgagaactgtggaaatcaggaatcctttggttaaaggctttgagattttccagtggacaaactatgccaagttctcaagcgaaaaattagaattagtttttagtgaagagatattgccttatcttttccagttaaaaaaattcataaaatataatctggaacatgttaagtcttttgaaaacaaatactctatgaggatttatgagtggttattaaaagaactaacacaaaagaaaactcacaaggcaaatatagagattagccttgatgaatttaagttcatgttaatgcttgaaaataactaccatgagtttaaaaggcttaaccaatgggttttgaaaccaataagtaaagatttaaacacttacagcaatatgaaattggtggttgataagcgaggccgcccgactgatacgttgattttccaagttgaactagatagacaaatggatctcgtaaccgaacttgagaacaaccagataaaaatgaatggtgacaaaataccaacaaccattacatcagattcctacctacataacggactaagaaaaacactacacgatgctttaactgcaaaaattcagctcaccagttttgaggcaaaatttttgagtgacatgcaaagtaagtatgatctcaatggttcgttctcatggctcacgcaaaaacaacgaaccacactagagaacatactggctaaatacggaaggatctgaggttcttatggctcttgtatctatcagtgaagcatcaagactaacaaacaaaagtagaacaactgttcaccgttacatatcaaagggaaaactgtccatatgcacagatgaaaacggtgtaaaaaagatagatacatcagagcttttacgagtttttggtgcatttaaagctgttcaccatgaacagatcgacaatgtaacagatgaacagcatgtaacacctaatagaacaggtgaaaccagtaaaacaaagcaactagaacatgaaattgaacacctgagacaacttgttacagctcaacagtcacacatagacagcctgaaacaggcgatgctgcttatcgaatcaaagctgccgacaacacgggagccagtgacgcctcccgtggggaaaaaatcatggcaattctggaagaaatagcgctttcagcctgtgggcggacaaaatagttgggaactgggaggggtggaaatggagtttttaaggattatttagggaagagtgacaaaatagatgggaactgggtgtagcgtcgtaagctaatacgaaaattaaaaatgacaaaatagtttggaactagatttcacttatctggttggtcgacactagtattaccctgttatccctagatttaaatgatatcggatcctagtaagccacgttttaattaatcagatcccgggctacctacgggaggcagcagtggggttgttacacgcctgccgcgacgctgaatgacccggactagagtggcgggatctatggcgtgtgacccgttatgctccatttcggtcagtgggtcactgctagtagtcgactgcattgccattctccgagtgatttagcgtggcggccgcagaggacccataaaatgcagtcgtagcccacctgaccgtacttagaaatgagggtccacctttgcccacgcacctgttcgctcgtcgtttgcttttaaggaccgcacgaaccacagagcatagggagaacctctagctcctttacaaagtgctggttccctttccagcgggatgccttatctaaacgcaatgacaggcgtattcctcaggccacatcgcttcctacttccgctgggatccatcgttggcggccgaagccgccattccataacaggattagataccctggtagtctttccatgcgcgcaccataccctcctagttccccggttatctctcctgtctcttatacacatctgacgctgccgacgaatagagaggtgtagatctcggtggtcgccgtatcattgtgtaggctggagctgcttcgaagttcctatactttctagagaataggaacttcggaataggaacttcatttaaatggcgcgccttacgcatcgatgacagtcattcatctttctgcccctccaaaagcaaaaacccgccgaagcgggtttttacgtaaatcaggtgaaactgaccgactcgagaggaacttcaagaattctcattggctggcaccaagcagtttaactgcttcatacttcacgaatttaatgagcgccgccacctgatccgcacgagcgggcaaataatcttcttcttgcccaagataagcccgcttggcattcaacaggatgggctgatgttgagctggcaagcgtgccattgcccaagtggcagcaacatcctttggcgcgatcttgccggttgctgcggtgtaccagatacgagacaaagtaagcactacattccgctcatcgcctgcccaatctggcggcgagttccatagcttcagagtatcggccagtgccttgaatagatcgctttctgggactgagctgaagagatccttcgctgctgaacctgccaagacgacgctatgttgctttgcctttgttagcagaatcgccaagtcagaatcggttgtggcgggctcgaagatgcccgcaaggatgtctttgcgctgccactctccgaactgcagttcccgcctggccggataacgccaaggtacgatgtcactgtgcacgacgatggtcacttccaaggcgcggagtgccttgttttggccaggggaagctgaaacctccaagagatcgacgagcagggcttgccgcacggcatcattgagcggtgcagctacagtcaccagcaaatcaatatcactgtacggtttcaatccgccatccagtgcggagccgtacaaatgcacggccagcaacgtcgactccaagtggcgcccgatgacgttgagtgcttgtgatagttgcaccgaaatctcggcgggcactttttcactcatgcgaaacgatcctcatcctgtctcttgatcagatcttgatcccctgcgccatcagatccttggcggcaagaaagccatccagtttactttgcagggcttcccaaccttaccagagggcgccccagctggcaattccggttcgcttgcctcgagcacctaggaggcgcgccacggccgcgtcgaccccacgcccctctttaatacgacgggcaatttgcacttcagaaaatgaagagtttgctttagccataacaaaagtccagtatgctttttcacagcataactggactgatttcagtttacaactattctgtctagtttaagactttattgtcatagtttagatctattttgttcagtttaagactttattgtccgcccaca

SEQ ID NO: 151 - DNA, 16331 bp, Artificial Sequence
  plasmid pGRG36-SmTc
ggccacgatgcgtccggcgtagaggatctgctcatgtttgacagcttatcatcgatgcataatgtgcctgtcaaatggacgaagcagggattctgcaaaccctatgctactccgtcaagccgtcaattgtctgattcgttaccaattatgacaacttgacggctacatcattcactttttcttcacaaccggcacggaactcgctcgggctggccccggtgcattttttaaatacccgcgagaaatagagttgatcgtcaaaaccaacattgcgaccgacggtggcgataggcatccgggtggtgctcaaaagcagcttcgcctggctgatacgttggtcctcgcgccagcttaagacgctaatccctaactgctggcggaaaagatgtgacagacgcgacggcgacaagcaaacatgctgtgcgacgctggcgatatcaaaattgctgtctgccaggtgatcgctgatgtactgacaagcctcgcgtacccgattatccatcggtggatggagcgactcgttaatcgcttccatgcgccgcagtaacaattgctcaagcagatttatcgccagcagctccgaatagcgcccttccccttgcccggcgttaatgatttgcccaaacaggtcgctgaaatgcggctggtgcgcttcatccgggcgaaagaaccccgtattggcaaatattgacggccagttaagccattcatgccagtaggcgcgcggacgaaagtaaacccactggtgataccattcgcgagcctccggatgacgaccgtagtgatgaatctctcctggcgggaacagcaaaatatcacccggtcggcaaacaaattctcgtccctgatttttcaccaccccctgaccgcgaatggtgagattgagaatataacctttcattcccagcggtcggtcgataaaaaaatcgagataaccgttggcctcaatcggcgttaaacccgccaccagatgggcattaaacgagtatcccggcagcaggggatcattttgcgcttcagccatacttttcatactcccgccattcagagaagaaaccaattgtccatattgcatcagacattgccgtcactgcgtcttttactggctcttctcgctaaccaaaccggtaaccccgcttattaaaagcattctgtaacaaagcgggaccaaagccatgacaaaaacgcgtaacaaaagtgtctataatcacggcagaaaagtccacattgattatttgcacggcgtcacactttgctatgccatagcatttttatccataagattagcggatcctacctgacgctttttatcgcaactctctactgtttctccatacccgtttttttgggctagcgaattcgagctcggtacccaagtcttaaactagacagaatagttgtaaactgaaatcagtccagttatgctgtgaaaaagcatactggacttttgttatggctaaagcaaactcttcattttctgaagtgcaaattgcccgtcgtattaaagaggggcgtggccaagggcatggtaaagactatattccatggctaacagtacaagaagttccttcttcaggtcgttcccaccgtatttattctcataagacgggacgagtccatcatttgctatctgacttagagcttgctgtttttctcagtcttgagtgggagagcagcgtgctagatatacgcgagcagttccccttattacctagtgataccaggcagattgcaatagatagtggtattaagcatcctgttattcgtggtgtagatcaggttatgtctactgattttttagtggactgcaaagatggtccttttgagcagtttgctattcaagtcaaacctgcagcagccttacaagacgagcgtaccttagaaaaactagaactagagcgtcgctattggcagcaaaagcaaattccttggttcatttttactgataaagaaataaatcccgtagtaaaagaaaatattgaatggctttattcagtgaaaacagaagaagtttctgcggagcttttagcacaactatccccattggcccatatcctgcaagaaaaaggagatgaaaacattatcaatgtctgtaagcaggttgatattgcttatgatttggagttaggcaaaacattgagtgagatacgagccttaaccgcaaatggttttattaagttcaatatttataagtctttcagggcaaataagtgtgcagatctctgtattagccaagtagtgaatatggaggagttgcgctatgtggcaaattaatgaggttgtgctatttgataatgatccgtatcgcattttggctatagaggatggccaagttgtctggatgcaaataagcgctgataaaggagttccacaagctagggctgagttgttgctaatgcagtatttagatgaaggccgcttagttagaactgatgacccttatgtacatcttgatttagaagagccgtctgtagattctgtcagcttccagaagcgcgaggaggattatcgaaaaattcttcctattattaatagtaaggatcgtttcgaccctaaagtcagaagcgaactcgttgagcatgtggtccaagaacataaggttactaaggctacagtttataagttgttacgccgttactggcagcgtggtcaaacgcctaatgcattaattcctgactacaaaaacagcggtgcaccaggggaaagacgttcagcgacaggaacagcaaagattggccgagccagagaatatggtaagggtgaaggaaccaaggtaacgcccgagattgaacgcctttttaggttgaccatagaaaagcacctgttaaatcaaaaaggtacaaagaccaccgttgcctatagacgatttgtggacttgtttgctcagtattttcctcgcattccccaagaggattacccaacactacgtcagtttcgttatttttatgatcgagaataccctaaagctcagcgcttaaagtctagagttaaagcaggggtatataaaaaagacgtacgacccttaagtagtacagccacttctcaggcgttaggccctgggagtcgttatgagattgatgccacgattgctgatatttatttagtggatcatcatgatcgccaaaaaatcataggaagaccaacgctttacattgtgattgatgtgtttagtcggatgatcacgggcttttatatcggctttgaaaatccgtcttatgtggtggcgatgcaggcttttgtaaatgcttgctctgacaaaacggccatttgtgcccagcatgatattgagattagtagctcagactggccgtgtgtaggtttgccagatgtgttgctagcggaccgtggcgaattaatgagtcatcaggtcgaagccttagtttctagttttaatgtgcgagtggaaagtgctccacctagacgtggcgatgctaaaggcatagtggaaagcacttttagaacactacaagccgagtttaagtcctttgcacctggcattgtagagggcagtcggatcaaaagccatggtgaaacagactataggttagatgcatctctgtcggtatttgagttcacacaaattattttgcgtacgatcttattcagaaataaccatctggtgatggataaatacgatcgagatgctgattttcctacagatttaccgtctattcctgtccagctatggcaatggggtatgcagcatcgtacaggtagtttaagggctgtggagcaagagcagttgcgagtagcgttactgcctcgccgaaaggtctctatttcttcatttggcgttaatttgtggggtttgtattactcggggtcagagattctgcgtgagggttggttgcagcggagcactgatatagctagacctcaacatttagaagcggcttatgacccagtgctggttgatacgatttatttgtttccgcaagttggcagccgtgtattttggcgctgtaatctgacggaacgtagtcggcagtttaaaggtctctcattttgggaggtttgggatatacaagcacaagaaaaacacaataaagccaatgcgaagcaggatgagttaactaaacgcagggagcttgaggcgtttattcagcaaaccattcagaaagcgaataagttaacgcccagtactactgagcccaaatcaacacgcattaagcagattaaaactaataaaaaagaagccgtgacctcggagcgtaaaaaacgtgcggagcatttgaagccaagctcttcaggtgatgaggctaaagttattcctttcaacgcagtggaagcggatgatcaagaagattacagcctacccacatacgtgcctgaattatttcaggatccaccagaaaaggatgagtcatgagtgctacccggattcaagcagtttatcgtgatacgggggtagaggcttatcgtgataatccttttatcgaggccttaccaccattacaagagtcagtgaatagtgctgcatcactgaaatcctctttacagcttacttcctctgacttgcaaaagtcccgtgttatcagagctcataccatttgtcgtattccagatgactattttcagccattaggtacgcatttgctactaagtgagcgtatttcggtcatgattcgaggtggctacgtaggcagaaatcctaaaacaggagatttacaaaagcatttacaaaatggttatgagcgtgttcaaacgggagagttggagacatttcgctttgaggaggcacgatctacggcacaaagcttattgttaattggttgttctggtagtgggaagacgacctctcttcatcgtattctagccacgtatcctcaggtgatttaccatcgtgaactcaatgtagagcaggtggtgtatttgaaaatagactgctcgcataatggttcgctaaaagaaatctgcttgaattttttcagagcgttggatcgagccttgggctcgaactatgagcgtcgttatggcttaaaacgtcatggtatagaaaccatgttggctttgatgtcgcaaatagccaatgcacatgctttagggttgttggttattgatgaaattcagcatttaagccgctctcgttcgggtggatctcaagagatgctgaacttttttgtgacgatggtgaatattattggcgtaccagtgatgttgattggtacccctaaagcacgagagatttttgaggctgatttgcggtctgcacgtagaggggcagggtttggagctatattctgggatcctatacaacaaacgcaacgtggaaagcccaatcaagagtggatcgcttttacggataatctttggcaattacagcttttacaacgcaaagatgcgctgttatcggatgaggtccgtgatgtgtggtatgagctaagccaaggagtgatggacattgtagtaaaactttttgtactcgctcagctccgtgcgctagctttaggcaatgagcgtattaccgctggtttattgcggcaagtgtatcaagatgagttaaagcctgtgcaccccatgctagaggcattacgctcgggtatcccagaacgcattgctcgttattctgatctagtcgttcccgagattgataaacggttaatccaacttcagctagatatcgcagcgatacaagaacaaacaccagaagaaaaagcccttcaagagttagataccgaagatcagcgtcatttatatctgatgctgaaagaggattacgattcaagcctgttaattcccactattaaaaaagcgtttagccagaatccaacgatgacaagacaaaagttactgcctcttgttttgcagtggttgatggaaggcgaaacggtagtgtcagaactagaaaagccctccaagagtaaaaaggtttcggctataaaggtagtcaagcccagcgactgggatagcttgcctgatacggatttacgttatatctattcacaacgccaacctgaaaaaaccatgcatgaacggttaaaagggaaaggggtaatagtggatatggcgagcttatttaaacaagcaggttagccatgagaaactttcctgttccgtactcgaatgagctgatttatagcactattgcacgggcaggcgtttatcaagggattgttagtcctaagcagctgttggatgaggtgtatggcaaccgcaaggtggtcgctaccttaggtctgccctcgcatttaggtgtgatagcaagacatctacatcaaacaggacgttacgctgttcagcagcttatttatgagcataccttattccctttatatgctccgtttgtaggcaaggagcgccgagacgaagctattcggttaatggagtaccaagcgcaaggtgcggtgcatttaatgctaggagtcgctgcttctagagttaagagcgataaccgctttagatactgccctgattgcgttgctcttcagctaaataggtatggggaagccttttggcaacgagattggtatttgcccgctttgccatattgtccaaaacacggtgctttagtcttctttgatagagctgtagatgatcaccgacatcaattttgggctttgggtcatactgagctgctttcagactaccccaaagactccctatctcaattaacagcactagctgcttatatagcccctctgttagatgctccacgagcgcaagagctttccccaagccttgagcagtggacgctgttttatcagcgcttagcgcaggatctagggctaaccaaaagcaagcacattcgtcatgacttggtggcggagagagtgaggcagacttttagtgatgaggcactagagaaactggatttaaagttggcagagaacaaggacacgtgttggctgaaaagtatattccgtaagcatagaaaagcctttagttatttacagcatagtattgtgtggcaagccttattgccaaaactaacggttatagaagcgctacagcaggcaagtgctcttactgagcactctataacgacaagacctgttagccagtctgtgcaacctaactctgaagatttatctgttaagcataaagactggcagcaactagtgcataaataccaaggaattaaggcggcaagacagtctttagagggtggggtgctatacgcttggctttaccgacatgacagggattggctagttcactggaatcaacagcatcaacaagagcgtctggcacccgcccctagagttgattggaaccaaagagatcgaattgctgtacgacaactattaagaatcataaagcgtctagatagtagccttgatcacccaagagcgacatcgagctggctgttaaagcaaactcctaacggaacctctcttgcaaaaaatctacagaaactgcctttggtagcgctttgcttaaagcgttactcagagagtgtggaagattatcaaattagacggattagccaagcttttattaagcttaaacaggaagatgttgagcttaggcgctggcgattattaagaagtgcaacgttatctaaagagcggataactgaggaagcacaaagattcttggaaatggtttatggggaagagtgagtggttaggctagctacatttaatgacaatgtgcaggttgtacatattggtcatttattccgtaactcgggtcataaggagtggcgtatttttgtttggtttaatccaatgcaagaacggaaatggactcgatttactcatttgcctttattaagtcgagctaaggtggttaacagtacaacaaagcaaataaataaggcggatcgtgtgattgagtttgaagcatcggatcttcaacgagccaaaataatcgattttcctaatctctcgtcctttgcttccgtacgcaacaaggatggagcgcagagttcatttatttacgaagctgaaacaccatatagcaagactcgttatcacatcccacagttagagctagctcggtcattatttttaggggatcctctagagtcgacctgcaggcatgcaagcttggctgttttggcggatgagagaagattttcagcctgatacagattaaatcagaacgcagaagcggtctgataaaacagaatttgcctggcggcagtagcgcggtggtcccacctgaccccatgccgaactcagaagtgaaacgccgtagcgccgatggtagtgtggggtctccccatgcgagagtagggaactgccaggcatcaaataaaacgaaaggctcagtcgaaagactgggcctttcgttttatctgttgtttgtcggtgaacgctctcctgagtaggacaaatccgccgggagcggatttgaacgttgcgaagcaacggcccggagggtggcgggcaggacgcccgccataaactgccaggcatcaaattaagcagaaggccatcctgacggatggcctttttgcgtttctacaaactcttttgtttatttttctaaatacattcaaatatgtatccgctcatgagacaataaccctgataaatgcttcaataatattgaaaaaggaagagtatgagtattcaacatttccgtgtcgcccttattcccttttttgcggcattttgccttcctgtttttgctcacccagaaacgctggtgaaagtaaaagatgctgaagatcagttgggtgcacgagtgggttacatcgaactggatctcaacagcggtaagatccttgagagttttcgccccgaagaacgttttccaatgatgagcacttttaaagttctgctatgtggcgcggtattatcccgtgttgacgccgggcaagagcaactcggtcgccgcatacactattctcagaatgacttggttgagtactcaccagtcacagaaaagcatcttacggatggcatgacagtaagagaattatgcagtgctgccataaccatgagtgataacactgcggccaacttacttctgacaacgatcggaggaccgaaggagctaaccgcttttttgcacaacatgggggatcatgtaactcgccttgatcgttgggaaccggagctgaatgaagccataccaaacgacgagcgtgacaccacgatgcctgcagcaatggcaacaacgttgcgcaaactattaactggcgaactacttactctagcttcccggcaacaattaatagactggatggaggcggataaagttgcaggaccacttctgcgctcggcccttccggctggctggtttattgctgataaatctggagccggtgagcgtgggtctcgcggtatcattgcagcactggggccagatggtaagccctcccgtatcgtagttatctacacgacggggagtcaggcaactatggatgaacgaaatagacagatcgctgagataggtgcctcactgattaagcattggtaactgtcagaccaagtttactcatatatactttagattgatttacgcgccctgtagcggcgcattaagcgcggcgggtgtggtggttacgcgcagcgtgaccgctacacttgccagcgccctagcgcccgctcctttcgctttcttcccttcctttctcgccacgttcgccgccggccagcctcgcagagcaggattcccgttgagcaccgccaggtgcgaataagggacagtgaagaaggaacacccgctcgcgggtgggcctacttcacctatcctgcccggcggcatcaccggcgccacaggtgcggttgctggcgcctatatcgccgacatcaccgatggggaagatcgggctcgccacttcgggctcatgagcgcttgtttcggcgtgggtatggtggcaggccccgtggccgggggactgttgggcgccatctccttgcatgcaccattccttgcggcggcggtgctcaacggcctcaacctactactgggctgcttcctaatgcaggagtcgcataagggagagcgtcgatccccgacagtaagacgggtaagcctgttgatgataccgctgccttactgggtgcattagccagtctgaatgacctgtcacgggataatccgaagtggtcagactggaaaatcagagggcaggaactgctgaacagcaaaaagtcagatagcaccacatagcagacccgccataaaacgccctgagaagcccgtgacgggcttttcttgtattatgggtagtttccttgcatgaatccataaaaggcgcctgtagtgccatttacccccattcactgccagagccgtgagcgcagcgaactgaatgtcacgaaaaagacagcgactcaggtgcctgatggtcggagacaaaaggaatattcagcgatttgcccgagcttgcgagggtgctacttaagcctttagggttttaaggtctgttttgtagaggagcaaacagcgtttgcgacatccttttgtaatactgcggaactgactaaagtagtgagttatacacagggctgggatctattctttttatctttttttattctttctttattctataaattataaccacttgaatataaacaaaaaaaacacacaaaggtctagcggaatttacagagggtctagcagaatttacaagttttccagcaaaggtctagcagaatttacagatacccacaactcaaaggaaaaggactagtaattatcattgactagcccatctcaattggtatagtgattaaaatcacctagaccaattgagatgtatgtctgaattagttgttttcaaagcaaatgaactagcgattagtcgctatgacttaacggagcatgaaaccaagctaattttatgctgtgtggcactactcaaccccacgattgaaaaccctacaaggaaagaacggacggtatcgttcacttataaccaatacgttcagatgatgaacatcagtagggaaaatgcttatggtgtattagctaaagcaaccagagagctgatgacgagaactgtggaaatcaggaatcctttggttaaaggctttgagattttccagtggacaaactatgccaagttctcaagcgaaaaattagaattagtttttagtgaagagatattgccttatcttttccagttaaaaaaattcataaaatataatctggaacatgttaagtcttttgaaaacaaatactctatgaggatttatgagtggttattaaaagaactaacacaaaagaaaactcacaaggcaaatatagagattagccttgatgaatttaagttcatgttaatgcttgaaaataactaccatgagtttaaaaggcttaaccaatgggttttgaaaccaataagtaaagatttaaacacttacagcaatatgaaattggtggttgataagcgaggccgcccgactgatacgttgattttccaagttgaactagatagacaaatggatctcgtaaccgaacttgagaacaaccagataaaaatgaatggtgacaaaataccaacaaccattacatcagattcctacctacataacggactaagaaaaacactacacgatgctttaactgcaaaaattcagctcaccagttttgaggcaaaatttttgagtgacatgcaaagtaagtatgatctcaatggttcgttctcatggctcacgcaaaaacaacgaaccacactagagaacatactggctaaatacggaaggatctgaggttcttatggctcttgtatctatcagtgaagcatcaagactaacaaacaaaagtagaacaactgttcaccgttacatatcaaagggaaaactgtccatatgcacagatgaaaacggtgtaaaaaagatagatacatcagagcttttacgagtttttggtgcatttaaagctgttcaccatgaacagatcgacaatgtaacagatgaacagcatgtaacacctaatagaacaggtgaaaccagtaaaacaaagcaactagaacatgaaattgaacacctgagacaacttgttacagctcaacagtcacacatagacagcctgaaacaggcgatgctgcttatcgaatcaaagctgccgacaacacgggagccagtgacgcctcccgtggggaaaaaatcatggcaattctggaagaaatagcgctttcagcctgtgggcggacaaaatagttgggaactgggaggggtggaaatggagtttttaaggattatttagggaagagtgacaaaatagatgggaactgggtgtagcgtcgtaagctaatacgaaaattaaaaatgacaaaatagtttggaactagatttcacttatctggttggtcgacactagtattaccctgttatccctagatttaaatgatatcggatcctagtaagccacgttttaattaatcagatcccgggctagtatgacgtctgtcgcacctgcttgatcgcggccgcgatagctagatcgcgttgctcctcttctccatccgcgttccaagctgcggaaaggcacccataagcgtacgcctggtcgagcaggcgacgcggatcgacgtccagcgcacgagagaatgcgtccgccatctgtgcaatgcgtctaggatcgagacaaaggtcgtctctgtcagccggatcgtagaacatattggcggcgccaaagcccacttcaccgaccagaccgacgggatctatcaccagccagccgcgactggagaacatgatgttttcatgatgcagatcgccatgtagcccacgcagttccgaggcattgctcatcatttgatcggctataatcgccgcgtggacgtagtcagtttgacaacctgcgttttgatcatcgcgcgcccgctgaaacaaagctgcaaagcgatcccggatcgggagaagggcagaaggcaggggttcctcagatgcggcatacagcttcgccattagttccgctgcaatttcggtcgcctggtagtcgccgtgctcggcaacgatgtgagagagcattcgctccccggcatattcgagcaacatcagattgttctcacgaccgagcaaccggactgctcccctcccattgcgccataccagatagtcggccccgcgcagttcatcagcaatgtcttctataggtttcaatcccttgacgattgcaggagtcccgtctggcaatgaaactttccaaacgaggctggaaaaggtgtccgcaatgagaacaggttgcgaaacgtgccaatgagcaggaaaaacaggcggcatgaacatcaaccccaagtcagagggtccaatcgcagatagaaggcaaggcgttcgcggtcgggggcttcgatccccaatacattgaataggacagcgaaggcgcgctctgcttcatctggcgctgcccagttctcttcggcgttagcaatcatgagtgccaaatcggcatagcgatctgctgttccgagccgcccaaggtcgatcagacccgtgcattgaagagttttagggtccaccatgaagttcggcatgcagggatcaccatggcaaacaaccatatcggtgcgctcttggtcgagccgcaccggtagctctcgttcgacacgagccaaaagatcgagctgcggcgtactcttgtcctcgtccggtaagaagtcgggattgacggcattgcgggacaccacatcaacggcgcgtccgaacattcgcgacagcctgcgctcaaacggacattgatcaaccgataggctgtgaacagcgccaagttgctgccccattgacggccacgctttgagcaaatccgctccagacagatcagccgccggtactcccggaattgccgttatcaccaagcatgcaccctcctgttcctcctgccagttgatgacctcggggcaagccacacctcgacctttgagccaaatgaggcggtcacgctctccagcgagctcaccgcggcgggaagcaggtgcgattttcgcgaaggcatgcccgtcaccacgtcgaaaaacaaaatcaccagattctccgcctctgacaggcaaccagtcagaatgcgattcaccaaaaaaaatattagttcgattcaataatatatacctcttaattttcaaagctagcataatacctaggactgagctagctgtaaacagatgttatgggaatggatgaattatataaataacctacgggaggcagcagtggaaagaggtgatcgactagaacgagattctgtagcgtagctgagcgtagggccgcgaggcgacctagagctgcattgaaaacaccattagcacctagacccatgcgacctagtggattctgctgcagagcgcggtggagcagatggcgaacacagtcaacgagtagtggatcgcccattaggaccacggcattaacgaggagcgcgaggatcagggcgagcgcatgagctagacccatgcgacctagagcccggaatgcatcggtatctgcctgtatgagaaaattctgctgagctaggaagtgattctgtagggcgaacgcatgagctagtggattacccattagatgattggccatacctagagcacccgcgagcacggcacccattaggcgaacgatcagagcagcattctgctgtagaacaggattagataccctggtagtcctgcaggcatgcctcgagtatagccagttttggggaagggttttggggaaagttttggggaagattttacatcatcataaaacaacgggcgtgttatacgcccgttatccatgggtatggacagttttccctttgatatgtaacgcacgttgtgcatcgatttgacaccctatcattgatagagttattttcccactccctatcagtgatagagaaaagtgaaatgaatagttcgacaaagatcgcattggtaattacgttactcgatgccatggggattggccttatcatgccagtcttgccaacgttattacgtgaatttattgcttcggaagatatcgctaaccactttggcgtattgcttgcactttatgcgttaatgcaggttatctttgctccttggcttggaaaaatgtctgaccgatttggtcggcgcccagtgctgttgttgtcattaataggcgcatcgctggattacttattgctggctttttcaagtgcgctttggatgctgtatttaggccgtttgctttcagggatcacaggagctactggggctgtcgcggcatcggtcattgccgataccacctcagcttctcaacgcgtgaagtggttcggttggttaggggcaagttttgggcttggtttaatagcggggcctattattggtggttttgcaggagagatttcaccgcatagtcccttttttatcgctgcgttgctaaatattgtcactttccttgtggttatgttttggttccgtgaaaccaaaaatacacgtgataatacagataccgaagtaggggttgagacgcaatcaaattcggtgtacatcactttatttaaaacgatgcccattttgttgattatttatttttcagcgcaattgataggccaaattcccgcaacggtgtgggtgctatttaccgaaaatcgttttggatggaatagcatgatggttggcttttcattagcgggtcttggtcttttacactcagtattccaagcctttgtggcaggaagaatagccactaaatggggcgaaaaaacggcagtactgctcgaatttattgcagatagtagtgcatttgcctttttagcgtttatatctgaaggttggttagatttccctgttttaattttattggctggtggtgggatcgctttacctgcattacagggagtgatgtctatccaaacaaagagtcatgagcaaggtgctttacagggattattggtgagccttaccaatgcaaccggtgttattggcccattactgtttactgttatttataatcattcactaccaatttgggatggctggatttggattattggtttagcgttttactgtattattatcctgctatcaatgaccttcatgttgacccctcaagctcaggggagtaaacaggagacaagtgcttagttatttcgtcaccaaatgaggcctccaaaacttcatttttaatttttgagctcgcttggactcctgttgatagatccagtaatgacctcagaactccatctggatttgttcagaacgctcggttgccgccgggcgttttttattggtgagaatccaagcgtcgacctagctcgagcacctaggaggcgcgccacggccgcgtcgaccccacgcccctctttaatacgacgggcaatttgcacttcagaaaatgaagagtttgctttagccataacaaaagtccagtatgctttttcacagcataactggactgatttcagtttacaactattctgtctagtttaagactttattgtcatagtttagatctattttgttcagtttaagactttattgtccgcccaca

SEQ ID NO: 152 - DNA, 6216 bp, Artificial Sequence
  plasmid pKN02
catgagacaataaccctgataaatgcttcaataatattgaaaaaggaagagtatgagtattcaacatttccgtgtcgcccttattcccttttttgcggcattttgccttcctgtttttgctcacccagaaacgctggtgaaagtaaaagatgctgaagatcagttgggtgcacgagtgggttacatcgaactggatctcaacagcggtaagatccttgagagttttcgccccgaagaacgttttccaatgatgagcacttttaaagttctgctatgtggcgcggtattatcccgtgttgacgccgggcaagagcaactcggtcgccgcatacactattctcagaatgacttggttgagtactcaccagtcacagaaaagcatcttacggatggcatgacagtaagagaattatgcagtgctgccataaccatgagtgataacactgcggccaacttacttctgacaacgatcggaggaccgaaggagctaaccgcttttttgcacaacatgggggatcatgtaactcgccttgatcgttgggaaccggagctgaatgaagccataccaaacgacgagcgtgacaccacgatgcctgcagcaatggcaacaacgttgcgcaaactattaactggcgaactacttactctagcttcccggcaacaattaatagactggatggaggcggataaagttgcaggaccacttctgcgctcggcccttccggctggctggtttattgctgataaatctggagccggtgagcgtgggtctcgcggtatcattgcagcactggggccagatggtaagccctcccgtatcgtagttatctacacgacggggagtcaggcaactatggatgaacgaaatagacagatcgctgagataggtgcctcactgattaagcattggtaacaggtcggtcagtttcacctgatttacgtaaaaacccgcttcggcgggtttttgcttttggaggggcagaaagatgaatgactgtctcataaaaaatttatttgctttcaggaaaatttttctgtataatagattctcgcaagatgtggcgtgttagttttagagctagaaatagcaagttaaaataaggctagtccgttatcaacttgaaaaagtggcaccgagtcggtgcttttaaaaaaaaaaccccgccctgtcaggggcggggtttttttttacaagtctcagtgtgctgaactagtcttttccgctgcataaccctgcttcggggtcattatagcgattttttcggtatatccatcctttttcgcacgatatacaggattttgccaaagggttcgtgtagactttccttggtgtatccaacggcgtcagccgggcaggataggtgaagtaggcccacccgcgagcgggtgttccttcttcactgtcccttattcgcacctggcggtgctcaacgggaatcctgctctgcgaggctggccgtaggccggccggcgcgccgatctgaagatcagcagttcaacctgttgatagtacgtactaagctctcatgtttcacgtactaagctctcatgtttaacgtactaagctctcatgtttaacgaactaaaccctcatggctaacgtactaagctctcatggctaacgtactaagctctcatgtttcacgtactaagctctcatgtttgaacaataaaattaatataaatcagcaacttaaatagcctctaaggttttaagttttataagaaaaaaaagaatatataaggcttttaaagcctttaaggtttaacggttgtggacaacaagccagggatgtaacgcactgagaagcccttagagcctctcaaagcaattttgagtgacacaggaacacttaacggctgacatggtttatcagccataaaacaatacttaatactatagaatgataacaaaataaactactttttaaaagaattttgtgttataatctatttattattaagtattgggtaatattttttgaagagatattttgaaaaagaaaaattaaagcatattaaactaatttcggaggtcattaaaactattattgaaatcatcaaactcattatggatttaatttaaactttttattttaggaggcaaaaatggataagaaatactcaataggcttagatatcggcacaaatagcgtcggatgggcggtgatcactgatgaatataaggttccgtctaaaaagttcaaggttctgggaaatacagaccgccacagtatcaaaaaaaatcttataggggctcttttatttgacagtggagagacagcggaagcgactcgtctcaaacggacagctcgtagaaggtatacacgtcggaagaatcgtatttgttatctacaggagattttttcaaatgagatggcgaaagtagatgatagtttctttcatcgacttgaagagtcttttttggtggaagaagacaagaagcatgaacgtcatcctatttttggaaatatagtagatgaagttgcttatcatgagaaatatccaactatctatcatctgcgaaaaaaattggtagattctactgataaagcggatttgcgcttaatctatttggccttagcgcatatgattaagtttcgtggtcattttttgattgagggagatttaaatcctgataatagtgatgtggacaaactatttatccagttggtacaaacctacaatcaattatttgaagaaaaccctattaacgcaagtggagtagatgctaaagcgattctttctgcacgattgagtaaatcaagacgattagaaaatctcattgctcagctccccggtgagaagaaaaatggcttatttgggaatctcattgctttgtcattgggtttgacccctaattttaaatcaaattttgatttggcagaagatgctaaattacagctttcaaaagatacttacgatgatgatttagataatttattggcgcaaattggagatcaatatgctgatttgtttttggcagctaagaatttatcagatgctattttactttcagatatcctaagagtaaatactgaaataactaaggctcccctatcagcttcaatgattaaacgctacgatgaacatcatcaagacttgactcttttaaaagctttagttcgacaacaacttccagaaaagtataaagaaatcttttttgatcaatcaaaaaacggatatgcaggttatattgatgggggagctagccaagaagaattttataaatttatcaaaccaattttagaaaaaatggatggtactgaggaattattggtgaaactaaatcgtgaagatttgctgcgcaagcaacggacctttgacaacggctctattccccatcaaattcacttgggtgagctgcatgctattttgagaagacaagaagacttttatccatttttaaaagacaatcgtgagaagattgaaaaaatcttgacttttcgaattccttattatgttggtccattggcgcgtggcaatagtcgttttgcatggatgactcggaagtctgaagaaacaattaccccatggaattttgaagaagttgtcgataaaggtgcttcagctcaatcatttattgaacgcatgacaaactttgataaaaatcttccaaatgaaaaagtactaccaaaacatagtttgctttatgagtattttacggtttataacgaattgacaaaggtcaaatatgttactgaaggaatgcgaaaaccagcatttctttcaggtgaacagaagaaagccattgttgatttactcttcaaaacaaatcgaaaagtaaccgttaagcaattaaaagaagattatttcaaaaaaatagaatgttttgatagtgttgaaatttcaggagttgaagatagatttaatgcttcattaggtacctaccatgatttgctaaaaattattaaagataaagattttttggataatgaagaaaatgaagatatcttagaggatattgttttaacattgaccttatttgaagatagggagatgattgaggaaagacttaaaacatatgctcacctctttgatgataaggtgatgaaacagcttaaacgtcgccgttatactggttggggacgtttgtctcgaaaattgattaatggtattagggataagcaatctggcaaaacaatattagattttttgaaatcagatggttttgccaatcgcaattttatgcagctgatccatgatgatagtttgacatttaaagaagacattcaaaaagcacaagtgtctggacaaggcgatagtttacatgaacatattgcaaatttagctggtagccctgctattaaaaaaggtattttacagactgtaaaagttgttgatgaattggtcaaagtaatggggcggcataagccagaaaatatcgttattgaaatggcacgtgaaaatcagacaactcaaaagggccagaaaaattcgcgagagcgtatgaaacgaatcgaagaaggtatcaaagaattaggaagtcagattcttaaagagcatcctgttgaaaatactcaattgcaaaatgaaaagctctatctctattatctccaaaatggaagagacatgtatgtggaccaagaattagatattaatcgtttaagtgattatgatgtcgatcacattgttccacaaagtttccttaaagacgattcaatagacaataaggtcttaacgcgttctgataaaaatcgtggtaaatcggataacgttccaagtgaagaagtagtcaaaaagatgaaaaactattggagacaacttctaaacgccaagttaatcactcaacgtaagtttgataatttaacgaaagctgaacgtggaggtttgagtgaacttgataaagctggttttatcaaacgccaattggttgaaactcgccaaatcactaagcatgtggcacaaattttggatagtcgcatgaatactaaatacgatgaaaatgataaacttattcgagaggttaaagtgattaccttaaaatctaaattagtttctgacttccgaaaagatttccaattctataaagtacgtgagattaacaattaccatcatgcccatgatgcgtatctaaatgccgtcgttggaactgctttgattaagaaatatccaaaacttgaatcggagtttgtctatggtgattataaagtttatgatgttcgtaaaatgattgctaagtctgagcaagaaataggcaaagcaaccgcaaaatatttcttttactctaatatcatgaacttcttcaaaacagaaattacacttgcaaatggagagattcgcaaacgccctctaatcgaaactaatggggaaactggagaaattgtctgggataaagggcgagattttgccacagtgcgcaaagtattgtccatgccccaagtcaatattgtcaagaaaacagaagtacagacaggcggattctccaaggagtcaattttaccaaaaagaaattcggacaagcttattgctcgtaaaaaagactgggatccaaaaaaatatggtggttttgatagtccaacggtagcttattcagtcctagtggttgctaaggtggaaaaagggaaatcgaagaagttaaaatccgttaaagagttactagggatcacaattatggaaagaagttcctttgaaaaaaatccgattgactttttagaagctaaaggatataaggaagttaaaaaagacttaatcattaaactacctaaatatagtctttttgagttagaaaacggtcgtaaacggatgctggctagtgccggagaattacaaaaaggaaatgagctggctctgccaagcaaatatgtgaattttttatatttagctagtcattatgaaaagttgaagggtagtccagaagataacgaacaaaaacaattgtttgtggagcagcataagcattatttagatgagattattgagcaaatcagtgaattttctaagcgtgttattttagcagatgccaatttagataaagttcttagtgcatataacaaacatagagacaaaccaatacgtgaacaagcagaaaatattattcatttatttacgttgacgaatcttggagctcccgctgcttttaaatattttgatacaacaattgatcgtaaacgatatacgtctacaaaagaagttttagatgccactcttatccatcaatccatcactggtctttatgaaacacgcattgatttgagtcagctaggaggtgactga

SEQ ID NO: 153 - DNA, 3471 bp, Artificial Sequence
  plasmid pKN30
gcctgcccctcccttttggtgtccaaccggctcgacgggggcagcgcaaggcggtgcctccggcgggccactcaatgcttgagtatactcactagactttgcttcgcaaagtcgtgaccgcctacggcggctgcggcgccctacgggcttgctctccgggcttcgccctgcgcggtcgctgcgctcccttgccagcccgtggatatgtggacgatggccgcgagcggccaccggctggctcgcttcgctcggcccgtggacaaccctgctggacaagctgatggacaggctgcgcctgcccacgagcttgaccacagggattgcccaccggctacccagccttcgaccacatacccaccggctccaactgcgcggcctgcggccttgccccatcaatttttttaattttctctggggaaaagcctccggcctgcggcctgcgcgcttcgcttgccggttggacaccaagtggaaggcgggtcaaggctcgcgcagcgaccgcgcagcggcttggccttgacgcgcctggaacgacccaagcctatgcgagtgggggcagtcgaaggcgaagcccgcccgcctgccccccgagcctcacggcggcgagtgcgggggttccaagggggcagcgccaccttgggcaaggccgaaggccgcgcagtcgatcaacaagccccggaggggccactttttgccggagggggagccgcgccgaaggcgtgggggaaccccgcaggggtgcccttctttgggcaccaaagaactagatatagggcgaaatgcgaaagacttaaaaatcaacaacttaaaaaaggggggtacgcaacagctcattgcggcaccccccgcaatagctcattgcgtaggttaaagaaaatctgtaattgactgccacttttacgcaacgcataattgttgtcgcgctgccgaaaagttgcagctgattgcgcatggtgccgcaaccgtgcggcaccctaccgcatggagataagcatggccacgcagtccagagaaatcggcattcaagccaagaacaagcccggtcactgggtgcaaacggaacgcaaagcgcatgaggcgtgggccgggcttattgcgaggaaacccacggcggcaatgctgctgcatcacctcgtggcgcagatgggccaccagaacgccgtggtggtcagccagaagacactttccaagctcatcggacgttctttgcggacggtccaatacgcagtcaaggacttggtggccgagcgctggatctccgtcgtgaagctcaacggccccggcaccgtgtcggcctacgtggtcaatgaccgcgtggcgtggggccagccccgcgaccagttgcgcctgtcggtgttcagtgccgccgtggtggttgatcacgacgaccaggacgaatcgctgttggggcatggcgacctgcgccgcatcccgaccctgtatccgggcgagcagcaactaccgaccggccccggcgaggagccgcccagccagcccggcattccgggcatggaaccagacctgccagccttgaccgaaacggaggaatgggaacggcgcgggcagcagcgcctgccgatgcccgatgagccgtgttttctggacgatggcgagccgttggagccgccgacacgggtcacgctgccgcgccggtagcacttgggttgcgcagcaacccgtaagtgcgctgttccagactatcggctgtagccgcctcggtgcacccgggaattcagctgaatctagatacgtagtactaagtcctcaaggttcgtagaaccgcactagaacggctgcgccgttcggggttgcaaaggggcgtcccctttggcacaagcattgtaacatgcccggaacgggcttgtgtacaaagcttatcgtgcctgtgttttagaaggacaaaaaaatgccgtgcatacagcccacacaatgactcacataatcacccacaactcaaaacacacagcccacacaatcacccacactttaacccacaaaaaagaccacaaccccattgacaacccacaaaacaacccacataatcacccacacaaacggcgagcaaattgctttaaataaggtattatgccaatgtaggaggtagagagagagaggaaatgtaacaaaagatcccctcacgctgccgcaagcactcagggcgcaagggctgctaaaggaagcggaacacgtagaaagccagtccgcagaaacggtgctgaccccggatgaatgtcagctactgggctatctggacaagggaaaacgcaagcgcaaagagaaagcaggtagcttgcagtgggcttacatggcgatagctagactgggcggttttatggacagcaagcgaaccggaattgccagctggggcgccctctggtaaggttgggaagccctgcaaagtaaactggatggctttcttgccgccaaggatctgatggcgcaggggatcaagatctgatcaagagacaggatgaggatcgtttcgcatgattgaacaagatggattgcacgcaggttctccggccgcttgggtggagaggctattcggctatgactgggcacaacagacaatcggctgctctgatgccgccgtgttccggctgtcagcgcaggggcgcccggttctttttgtcaagaccgacctgtccggtgccctgaatgaactgcaggacgaggcagcgcggctatcgtggctggccacgacgggcgttccttgcgcagctgtgctcgacgttgtcactgaagcgggaagggactggctgctattgggcgaagtgccggggcaggatctcctgtcatctcaccttgctcctgccgagaaagtatccatcatggctgatgcaatgcggcggctgcatacgcttgatccggctacctgcccattcgaccaccaagcgaaacatcgcatcgagcgagcacgtactcggatggaagccggtcttgtcgatcaggatgatctggacgaagagcatcaggggctcgcgccagccgaactgttcgccaggctcaaggcgcgcatgcccgacggcgaggatctcgtcgtgacccatggcgatgcctgcttgccgaatatcatggtggaaaatggccgcttttctggattcatcgactgtggccggctgggtgtggcggaccgctatcaggacatagcgttggctacccgtgatattgctgaagagcttggcggcgaatgggctgaccgcttcctcgtgctttacggtatcgccgctcccgattcgcagcgcatcgccttctatcgccttcttgacgagttcttctgagcgggactctggggttcgaaatgaccgaccaagcgacgcccaacctgccatcacgagatttcgattccaccgccgccttctatgaaaggttgggcttcggaatcgttttccgggacgccggctggatgatcctccagcgcggggatctcatgctggagttcttcgcccaccccagcttcaaaagcgctct

SEQ ID NO: 154 - DNA, 3464 bp, Artificial Sequence
  plasmid pKN31
gcctgcccctcccttttggtgtccaaccggctcgacgggggcagcgcaaggcggtgcctccggcgggccactcaatgcttgagtatactcactagactttgcttcgcaaagtcgtgaccgcctacggcggctgcggcgccctacgggcttgctctccgggcttcgccctgcgcggtcgctgcgctcccttgccagcccgtggatatgtggacgatggccgcgagcggccaccggctggctcgcttcgctcggcccgtggacaaccctgctggacaagctgatggacaggctgcgcctgcccacgagcttgaccacagggattgcccaccggctacccagccttcgaccacatacccaccggctccaactgcgcggcctgcggccttgccccatcaatttttttaattttctctggggaaaagcctccggcctgcggcctgcgcgcttcgcttgccggttggacaccaagtggaaggcgggtcaaggctcgcgcagcgaccgcgcagcggcttggccttgacgcgcctggaacgacccaagcctatgcgagtgggggcagtcgaaggcgaagcccgcccgcctgccccccgagcctcacggcggcgagtgcgggggttccaagggggcagcgccaccttgggcaaggccgaaggccgcgcagtcgatcaacaagccccggaggggccactttttgccggagggggagccgcgccgaaggcgtgggggaaccccgcaggggtgcccttctttgggcaccaaagaactagatatagggcgaaatgcgaaagacttaaaaatcaacaacttaaaaaaggggggtacgcaacagctcattgcggcaccccccgcaatagctcattgcgtaggttaaagaaaatctgtaattgactgccacttttacgcaacgcataattgttgtcgcgctgccgaaaagttgcagctgattgcgcatggtgccgcaaccgtgcggcaccctaccgcatggagataagcatggccacgcagtccagagaaatcggcattcaagccaagaacaagcccggtcactgggtgcaaacggaacgcaaagcgcatgaggcgtgggccgggcttattgcgaggaaacccacggcggcaatgctgctgcatcacctcgtggcgcagatgggccaccagaacgccgtggtggtcagccagaagacactttccaagctcatcggacgttctttgcggacggtccaatacgcagtcaaggacttggtggccgagcgctggatctccgtcgtgaagctcaacggccccggcaccgtgtcggcctacgtggtcaatgaccgcgtggcgtggggccagccccgcgaccagttgcgcctgtcggtgttcagtgccgccgtggtggttgatcacgacgaccaggacgaatcgctgttggggcatggcgacctgcgccgcatcccgaccctgtatccgggcgagcagcaactaccgaccggccccggcgaggagccgcccagccagcccggcattccgggcatggaaccagacctgccagccttgaccgaaacggaggaatgggaacggcgcgggcagcagcgcctgccgatgcccgatgagccgtgttttctggacgatggcgagccgttggagccgccgacacgggtcacgctgccgcgccggtagcacttgggttgcgcagcaacccgtaagtgcgctgttccagactatcggctgtagccgcctcggtgcacccgggaattcagctgaatctagatacgtagtactaagtcctcaaggttcgtagaaccgcactagaacggctgcgccgttcggggttgcaaaggggcgtcccctttggcacaagcattgtaacatgcccggaacgggcttgtgtacaaagcttatgtgttttagaaggacaaaaaaatgccgtgcatacagcccacacaatgactcacataatcacccacaactcaaaacacacagcccacacaatcacccacactttaacccacaaaaaagaccacaaccccattgacaacccacaaaacaacccacataatcacccacacaaacggcgagcaaattgctttaaataaggtattatgccaatgtaggaggtagagagagagaggaaatgtaacaaaagatcccctcacgctgccgcaagcactcagggcgcaagggctgctaaaggaagcggaacacgtagaaagccagtccgcagaaacggtgctgaccccggatgaatgtcagctactgggctatctggacaagggaaaacgcaagcgcaaagagaaagcaggtagcttgcagtgggcttacatggcgatagctagactgggcggttttatggacagcaagcgaaccggaattgccagctggggcgccctctggtaaggttgggaagccctgcaaagtaaactggatggctttcttgccgccaaggatctgatggcgcaggggatcaagatctgatcaagagacaggatgaggatcgtttcgcatgattgaacaagatggattgcacgcaggttctccggccgcttgggtggagaggctattcggctatgactgggcacaacagacaatcggctgctctgatgccgccgtgttccggctgtcagcgcaggggcgcccggttctttttgtcaagaccgacctgtccggtgccctgaatgaactgcaggacgaggcagcgcggctatcgtggctggccacgacgggcgttccttgcgcagctgtgctcgacgttgtcactgaagcgggaagggactggctgctattgggcgaagtgccggggcaggatctcctgtcatctcaccttgctcctgccgagaaagtatccatcatggctgatgcaatgcggcggctgcatacgcttgatccggctacctgcccattcgaccaccaagcgaaacatcgcatcgagcgagcacgtactcggatggaagccggtcttgtcgatcaggatgatctggacgaagagcatcaggggctcgcgccagccgaactgttcgccaggctcaaggcgcgcatgcccgacggcgaggatctcgtcgtgacccatggcgatgcctgcttgccgaatatcatggtggaaaatggccgcttttctggattcatcgactgtggccggctgggtgtggcggaccgctatcaggacatagcgttggctacccgtgatattgctgaagagcttggcggcgaatgggctgaccgcttcctcgtgctttacggtatcgccgctcccgattcgcagcgcatcgccttctatcgccttcttgacgagttcttctgagcgggactctggggttcgaaatgaccgaccaagcgacgcccaacctgccatcacgagatttcgattccaccgccgccttctatgaaaggttgggcttcggaatcgttttccgggacgccggctggatgatcctccagcgcggggatctcatgctggagttcttcgcccaccccagcttcaaaagcgctct

SEQ ID NO: 155 - DNA, 3517 bp, Artificial Sequence
  plasmid pNA01
gcctgcccctcccttttggtgtccaaccggctcgacgggggcagcgcaaggcggtgcctccggcgggccactcaatgcttgagtatactcactagactttgcttcgcaaagtcgtgaccgcctacggcggctgcggcgccctacgggcttgctctccgggcttcgccctgcgcggtcgctgcgctcccttgccagcccgtggatatgtggacgatggccgcgagcggccaccggctggctcgcttcgctcggcccgtggacaaccctgctggacaagctgatggacaggctgcgcctgcccacgagcttgaccacagggattgcccaccggctacccagccttcgaccacatacccaccggctccaactgcgcggcctgcggccttgccccatcaatttttttaattttctctggggaaaagcctccggcctgcggcctgcgcgcttcgcttgccggttggacaccaagtggaaggcgggtcaaggctcgcgcagcgaccgcgcagcggcttggccttgacgcgcctggaacgacccaagcctatgcgagtgggggcagtcgaaggcgaagcccgcccgcctgccccccgagcctcacggcggcgagtgcgggggttccaagggggcagcgccaccttgggcaaggccgaaggccgcgcagtcgatcaacaagccccggaggggccactttttgccggagggggagccgcgccgaaggcgtgggggaaccccgcaggggtgcccttctttgggcaccaaagaactagatatagggcgaaatgcgaaagacttaaaaatcaacaacttaaaaaaggggggtacgcaacagctcattgcggcaccccccgcaatagctcattgcgtaggttaaagaaaatctgtaattgactgccacttttacgcaacgcataattgttgtcgcgctgccgaaaagttgcagctgattgcgcatggtgccgcaaccgtgcggcaccctaccgcatggagataagcatggccacgcagtccagagaaatcggcattcaagccaagaacaagcccggtcactgggtgcaaacggaacgcaaagcgcatgaggcgtgggccgggcttattgcgaggaaacccacggcggcaatgctgctgcatcacctcgtggcgcagatgggccaccagaacgccgtggtggtcagccagaagacactttccaagctcatcggacgttctttgcggacggtccaatacgcagtcaaggacttggtggccgagcgctggatctccgtcgtgaagctcaacggccccggcaccgtgtcggcctacgtggtcaatgaccgcgtggcgtggggccagccccgcgaccagttgcgcctgtcggtgttcagtgccgccgtggtggttgatcacgacgaccaggacgaatcgctgttggggcatggcgacctgcgccgcatcccgaccctgtatccgggcgagcagcaactaccgaccggccccggcgaggagccgcccagccagcccggcattccgggcatggaaccagacctgccagccttgaccgaaacggaggaatgggaacggcgcgggcagcagcgcctgccgatgcccgatgagccgtgttttctggacgatggcgagccgttggagccgccgacacgggtcacgctgccgcgccggtagcacttgggttgcgcagcaacccgtaagtgcgctgttccagactatcggctgtagccgcctcggtgcacccgggaattcagctgaatctagatacgtagtactaagtcctcaaggttcgtagaaccgcactagaacggctgcgccgttcggggttgcaaaggggcgtcccctttggcacaagcattgtaacatgcccggaacgggcttgtgtacaaagcttatcgtgcctgtgttttagaaggacaaaaaaatgccgtgcatacagcccacacaatgactcacataatcacccacaactcaaaacacacagcccacacaatcacccacactttaacccacaaaaaagaccacaaccccattgacaacccacaaaacaacccacataatcacccacacaaacggcgagcaaattgctttaaataaggtattatgccaatgtaggaggtagagagagagaggaaatgtaacaaattaaaaatgaagttttaaatcaatctaaagtatatatgagtaaacttggtctgacagctcgagattctcatgtttgacagcttatcatcgataagctttaatgcggtagtttatcacagttaaattgctaacgcagtcaggcaccgtgtatgaaatctaacaatgcgctcatcgtcatcctcggcaccgtcaccctggatgctgtaggcataggcttggttatgccggtactgccgggcctcttgcgggatatcgtccattccgacagcatcgccagtcactatggcgtgctgctagcgctatatgcgttgatgcaatttctatgcgcacccgttctcggagcactgtccgaccgctttggccgccgcccagtcctgctcgcttcgctacttggagccactatcgactacgcgatcatggcgaccacacccgtcctgtggatcctctacgccggacgcatcgtggccggcatcaccggcgccacaggtgcggttgctggcgcctatatcgccgacatcaccgatggggaagatcgggctcgccacttcgggctcatgagcgcttgtttcggcgtgggtatggtggcaggccccgtggccgggggactgttgggcgccatctccttgcatgcaccattccttgcggcggcggtgctcaacggcctcaacctactactgggctgcttcctaatgcaggagtcgcataagggagagcgtcgaccgatgcccttgagagccttcaacccagtcagctccttccggtgggcgcggggcatgactatcgtcgccgcacttatgactgtcttctttatcatgcaactcgtaggacaggtgccggcagcgctctgggtcattttcggcgaggaccgctttcgctggagcgcgacgatgatcggcctgtcgcttgcggtattcggaatcttgcacgccctcgctcaagccttcgtcactggtcccgccaccaaacgtttcggcgagaagcaggccattatcgccggcatggcggccgacgcgctgggctacgtcttgctggcgttcgcgacgcgaggctggatggccttccccattatgattcttctcgcttccggcggcatcgggatgcccgcgttgcaggccatgctgtccaggcaggtagatgacgaccatcagggacagcttcaaggatcgctcgcggctcttaccagcctaacttcgatcactggaccgctgatcgtcacggcgatttatgccgcctcggcgagcacatggaacgggttggcatggattgtaggcgccgccctataccttgtctgcctccccgcgttgcgtcgcggtgcatggagccgggccacctcgacctaactcgagtgccacctgacgtctaagaaaccattatcgatgccgccgcttaa

SEQ ID NO: 156 - DNA, 3510 bp, Artificial Sequence
  plasmid pNA02
gcctgcccctcccttttggtgtccaaccggctcgacgggggcagcgcaaggcggtgcctccggcgggccactcaatgcttgagtatactcactagactttgcttcgcaaagtcgtgaccgcctacggcggctgcggcgccctacgggcttgctctccgggcttcgccctgcgcggtcgctgcgctcccttgccagcccgtggatatgtggacgatggccgcgagcggccaccggctggctcgcttcgctcggcccgtggacaaccctgctggacaagctgatggacaggctgcgcctgcccacgagcttgaccacagggattgcccaccggctacccagccttcgaccacatacccaccggctccaactgcgcggcctgcggccttgccccatcaatttttttaattttctctggggaaaagcctccggcctgcggcctgcgcgcttcgcttgccggttggacaccaagtggaaggcgggtcaaggctcgcgcagcgaccgcgcagcggcttggccttgacgcgcctggaacgacccaagcctatgcgagtgggggcagtcgaaggcgaagcccgcccgcctgccccccgagcctcacggcggcgagtgcgggggttccaagggggcagcgccaccttgggcaaggccgaaggccgcgcagtcgatcaacaagccccggaggggccactttttgccggagggggagccgcgccgaaggcgtgggggaaccccgcaggggtgcccttctttgggcaccaaagaactagatatagggcgaaatgcgaaagacttaaaaatcaacaacttaaaaaaggggggtacgcaacagctcattgcggcaccccccgcaatagctcattgcgtaggttaaagaaaatctgtaattgactgccacttttacgcaacgcataattgttgtcgcgctgccgaaaagttgcagctgattgcgcatggtgccgcaaccgtgcggcaccctaccgcatggagataagcatggccacgcagtccagagaaatcggcattcaagccaagaacaagcccggtcactgggtgcaaacggaacgcaaagcgcatgaggcgtgggccgggcttattgcgaggaaacccacggcggcaatgctgctgcatcacctcgtggcgcagatgggccaccagaacgccgtggtggtcagccagaagacactttccaagctcatcggacgttctttgcggacggtccaatacgcagtcaaggacttggtggccgagcgctggatctccgtcgtgaagctcaacggccccggcaccgtgtcggcctacgtggtcaatgaccgcgtggcgtggggccagccccgcgaccagttgcgcctgtcggtgttcagtgccgccgtggtggttgatcacgacgaccaggacgaatcgctgttggggcatggcgacctgcgccgcatcccgaccctgtatccgggcgagcagcaactaccgaccggccccggcgaggagccgcccagccagcccggcattccgggcatggaaccagacctgccagccttgaccgaaacggaggaatgggaacggcgcgggcagcagcgcctgccgatgcccgatgagccgtgttttctggacgatggcgagccgttggagccgccgacacgggtcacgctgccgcgccggtagcacttgggttgcgcagcaacccgtaagtgcgctgttccagactatcggctgtagccgcctcggtgcacccgggaattcagctgaatctagatacgtagtactaagtcctcaaggttcgtagaaccgcactagaacggctgcgccgttcggggttgcaaaggggcgtcccctttggcacaagcattgtaacatgcccggaacgggcttgtgtacaaagcttatgtgttttagaaggacaaaaaaatgccgtgcatacagcccacacaatgactcacataatcacccacaactcaaaacacacagcccacacaatcacccacactttaacccacaaaaaagaccacaaccccattgacaacccacaaaacaacccacataatcacccacacaaacggcgagcaaattgctttaaataaggtattatgccaatgtaggaggtagagagagagaggaaatgtaacaaattaaaaatgaagttttaaatcaatctaaagtatatatgagtaaacttggtctgacagctcgagattctcatgtttgacagcttatcatcgataagctttaatgcggtagtttatcacagttaaattgctaacgcagtcaggcaccgtgtatgaaatctaacaatgcgctcatcgtcatcctcggcaccgtcaccctggatgctgtaggcataggcttggttatgccggtactgccgggcctcttgcgggatatcgtccattccgacagcatcgccagtcactatggcgtgctgctagcgctatatgcgttgatgcaatttctatgcgcacccgttctcggagcactgtccgaccgctttggccgccgcccagtcctgctcgcttcgctacttggagccactatcgactacgcgatcatggcgaccacacccgtcctgtggatcctctacgccggacgcatcgtggccggcatcaccggcgccacaggtgcggttgctggcgcctatatcgccgacatcaccgatggggaagatcgggctcgccacttcgggctcatgagcgcttgtttcggcgtgggtatggtggcaggccccgtggccgggggactgttgggcgccatctccttgcatgcaccattccttgcggcggcggtgctcaacggcctcaacctactactgggctgcttcctaatgcaggagtcgcataagggagagcgtcgaccgatgcccttgagagccttcaacccagtcagctccttccggtgggcgcggggcatgactatcgtcgccgcacttatgactgtcttctttatcatgcaactcgtaggacaggtgccggcagcgctctgggtcattttcggcgaggaccgctttcgctggagcgcgacgatgatcggcctgtcgcttgcggtattcggaatcttgcacgccctcgctcaagccttcgtcactggtcccgccaccaaacgtttcggcgagaagcaggccattatcgccggcatggcggccgacgcgctgggctacgtcttgctggcgttcgcgacgcgaggctggatggccttccccattatgattcttctcgcttccggcggcatcgggatgcccgcgttgcaggccatgctgtccaggcaggtagatgacgaccatcagggacagcttcaaggatcgctcgcggctcttaccagcctaacttcgatcactggaccgctgatcgtcacggcgatttatgccgcctcggcgagcacatggaacgggttggcatggattgtaggcgccgccctataccttgtctgcctccccgcgttgcgtcgcggtgcatggagccgggccacctcgacctaactcgagtgccacctgacgtctaagaaaccattatcgatgccgccgcttaa

SEQ ID NO: 157 - DNA, 4804 bp, Artificial Sequence
  plasmid pNA22
tgtaggctggagctgcttcgaagttcctatactttctagagaataggaacttcggaataggaacttcatttaaatggcgcgccttacgccccgccctgccactcatcgcagtactgttgtattcattaagcatctgccgacatggaagccatcacaaacggcatgatgaacctgaatcgccagcggcatcagcaccttgtcgccttgcgtataatatttgcccatggtgaaaacgggggcgaagaagttgtccatattggccacgtttaaatcaaaactggtgaaactcacccagggattggctgagacgaaaaacatattctcaataaaccctttagggaaataggccaggttttcaccgtaacacgccacatcttgcgaatatatgtgtagaaactgccggaaatcgtcgtggtattcactccagagcgatgaaaacgtttcagtttgctcatggaaaacggtgtaacaagggtgaacactatcccatatcaccagctcaccgtctttcattgccatacgtaattccggatgagcattcatcaggcgggcaagaatgtgaataaaggccggataaaacttgtgcttatttttctttacggtctttaaaaaggccgtaatatccagctgaacggtctggttataggtacattgagcaactgactgaaatgcctcaaaatgttctttacgatgccattgggatatatcaacggtggtatatccagtgatttttttctccattttagcttccttagctcctgaaaatctcgacaactcaaaaaatacgcccggtagtgatcttatttcattatggtgaaagttggaacctcttacgtgccgatcaacgtctcattttcgccaaaagttggcccagggcttcccggtatcaacagggacaccaggatttatttattctgcgaagtgatcttccgtcacaggtaggcgcgccgaagttcctatactttctagagaataggaacttcggaataggaactaaggaggatattcatatggaccatggctaattcccatgtcagccgttaagtgttcctgtgtcactgaaaattgctttgagaggctctaagggcttctcagtgcgttacatccctggcttgttgtccacaaccgttaaaccttaaaagctttaaaagccttatatattcttttttttcttataaaacttaaaaccttagaggctatttaagttgctgatttatattaattttattgttcaaacatgagagcttagtacgtgaaacatgagagcttagtacgttagccatgagagcttagtacgttagccatgagggtttagttcgttaaacatgagagcttagtacgttaaacatgagagcttagtacgtgaaacatgagagcttagtacgtactatcaacaggttgaactgcggatcttgcggccgcaaaaattaaaaatgaagttttaaatcaatctaaagtatatatgagtaaacttggtctgacagttaccaatgcttaatcagtgaggcacctatctcagcgatctgtctatttcgttcatccatagttgcctgactccccgtcgtgtagataactacgatacgggagggcttaccatctggccccagtgctgcaatgataccgcgagacccacgctcaccggctccagatttatcagcaataaaccagccagccggaagggccgagcgcagaagtggtcctgcaactttatccgcctccatccagtctattaattgttgccgggaagctagagtaagtagttcgccagttaatagtttgcgcaacgttgttgccattgctacaggcatcgtggtgtcacgctcgtcgtttggtatggcttcattcagctccggttcccaacgatcaaggcgagttacatgatcccccatgttgtgcaaaaaagcggttagctccttcggtcctccgatcgttgtcagaagtaagttggccgcagtgttatcactcatggttatggcagcactgcataattctcttactgtcatgccatccgtaagatgcttttctgtgactggtgagtactcaaccaagtcattctgagaatagtgtatgcggcgaccgagttgctcttgcccggcgtcaatacgggataataccgcgccacatagcagaactttaaaagtgctcatcattggaaaacgttcttcggggcgaaaactctcaaggatcttaccgctgttgagatccagttcgatgtaacccactcgtgcacccaactgatcttcagcatcttttactttcaccagcgtttctgggtgagcaaaaacaggaaggcaaaatgccgcaaaaaagggaataagggcgacacggaaatgttgaatactcatactcttcctttttcaatattattgaagcatttatcagggttattgtctcatgagcggatacatatttgaatgtatttagaaaaataaacaaataggggttccgcgcacatttccccgaaaagtgccacctgcatcgatggccccccgatggtagtgtggggtctccccatgcgagagtagggaactgccaggcatcaaataaaacgaaaggctcagtcgaaagactgggcctttcgttttatctgttgtttgtcggtgaacgctctcctgagtaggacaaatccgccgggagcggatttgaacgttgcgaagcaacggcccggagggtggcgggcaggacgcccgccataaactgccaggcatcaaattaagcagaaggccatcctgacggatggcctttttgcgtggccagtgccaagcttgcatgcagattgcagcattacacgtcttgagcgattcgcgactatcaccggaagagcagatccgtttctggcaggactacgaagcgggaattgaaagctcattcctggtcccccaggaaaacaaaggcggaacaacaaaacgtcgccggggtgaacattccactaagccaaagtgtgagaatccagcctggttccgtcccgacaactataaggcgctgggcggacagttgggccacgcttacaatcgtctcgttaaaaaagacccggtcactggtcagaacacactcagaatgcacatgtcgttgcatccattttatgtactgaaacgtcagagtgtcggtcgcaaatataaattccgaccggagaaacagcggctgcttgacgcaatatgggttgtacttgtgagtttttgtgatcgtggattgcacactgtcggcatgtctgtctcccgcctggcagaagaaataagcccaaaagacagtaagggagacgtgattcctgaaaccgcagtcacagtatcgcgcctttcccgtctgctggcagagcaggtttcctttggcacgttgggaacgtcagaaaagacgatatgggatcgtgaatcccgccagcgactgccgaaatacgtctggatcaccgaaactggctggaaaatgctgggagttgatctggtgaaacttcaggagcagcaacgtaagcgccttgcagaaagtgaaatccgtctgcaattgattaaagaaggcgttatccgcgagggcgaagaaatctctgttcactcggctcgtaaacgctggtatgcgcagcgttctctcgatgccatcaagtcccgacgtaagaaagcagcggagcgcaaacgtgctaatcgcctggcaaaactgccgtatgatgaacagcgaaacgaaattgcgcggtttattctgaagcgtatgccgccggacgaagcgtactggtgcactaaagaaagattagagcaactggtagccagagatctacgtcagcttgaactggctctgacagcttcgccaccccactagtttagctgcctgatacaatcggcactctcttcagccccttcggggcttttcgtgttgcctgcatttcatgaaattcctcatatttgacgaccgtttttcattttgtcccgctctgacagttttttgatggccgcaatagggtatcggagtaaaaacgccttcggttatccacaaaaacccgcaaaggaataacttcagaaagcagcaaacatagaacatcaaacccgcaatatattcttaacccctgttctttaatcccctgcgttgcttcgccgcagggaaaatatttatctttgaaacaactgtggataatcacaaaaatgccttcgcttgcagcggctaacgccgcgccgctcagaatataaaagtacctcccaccgcttcgcggcgggcatatggacttctgcctaatgaaaaacaaagcccctccaaccctcctacaaaaaaacgctgcaaatactcagccacagtgcccaacccatcactgaaaagcgccgccgcccccgcccaaagggcgggaacaacatcgctttcaataatggatgttgtaactaagaaatctcatcgctgtcagccttctggctggaagtaccaaatacacgctcgtaagcggccctgacggtccgctaacgcggagatacgccccgactgcgggtaaacccttgtcgggaccactccgaccgcgcacaaaagctatttcatggctgaaagcgggtatggcttagcaggatggggatgggtaaggtgaaacctatcaatcagtaccggcttacgccgggcttcggcggtttagctctgtgccatataaaacaacagagtgccgccttacatgccgctggcgcggcatcaaaaagaaagccccccaataacggggggaaatagcgttttgatcaaaatgataatgctagtgtgcttcttgcgtgccattccaggcacaaactaaatttaacgtttcgttaactacaaagaaatccgatgagttaatcacttgcggaataaactcgag

SEQ ID NO: 158 - DNA, 4930 bp, Artificial Sequence
  plasmid pNA23
gtgtaggctggagctgcttcgaagttcctatactttctagagaataggaacttcggaataggaacttcatttaaatggcgcgccttacgccccgccctgccactcatcgcagtactgttgtattcattaagcatctgccgacatggaagccatcacaaacggcatgatgaacctgaatcgccagcggcatcagcaccttgtcgccttgcgtataatatttgcccatggtgaaaacgggggcgaagaagttgtccatattggccacgtttaaatcaaaactggtgaaactcacccagggattggctgagacgaaaaacatattctcaataaaccctttagggaaataggccaggttttcaccgtaacacgccacatcttgcgaatatatgtgtagaaactgccggaaatcgtcgtggtattcactccagagcgatgaaaacgtttcagtttgctcatggaaaacggtgtaacaagggtgaacactatcccatatcaccagctcaccgtctttcattgccatacgtaattccggatgagcattcatcaggcgggcaagaatgtgaataaaggccggataaaacttgtgcttatttttctttacggtctttaaaaaggccgtaatatccagctgaacggtctggttataggtacattgagcaactgactgaaatgcctcaaaatgttctttacgatgccattgggatatatcaacggtggtatatccagtgatttttttctccattttagcttccttagctcctgaaaatctcgacaactcaaaaaatacgcccggtagtgatcttatttcattatggtgaaagttggaacctcttacgtgccgatcaacgtctcattttcgccaaaagttggcccagggcttcccggtatcaacagggacaccaggatttatttattctgcgaagtgatcttccgtcacaggtaggcgcgccgaagttcctatactttctagagaataggaacttcggaataggaactaaggaggatattcatatggaccatggctaattcccatgtcagccgttaagtgttcctgtgtcactgaaaattgctttgagaggctctaagggcttctcagtgcgttacatccctggcttgttgtccacaaccgttaaaccttaaaagctttaaaagccttatatattcttttttttcttataaaacttaaaaccttagaggctatttaagttgctgatttatattaattttattgttcaaacatgagagcttagtacgtgaaacatgagagcttagtacgttagccatgagagcttagtacgttagccatgagggtttagttcgttaaacatgagagcttagtacgttaaacatgagagcttagtacgtgaaacatgagagcttagtacgtactatcaacaggttgaactgcggatcttgcggccgcaaaaattaaaaatgaagttttaaatcaatctaaagtatatatgagtaaacttggtctgacagttaccaatgcttaatcagtgaggcacctatctcagcgatctgtctatttcgttcatccatagttgcctgactccccgtcgtgtagataactacgatacgggagggcttaccatctggccccagtgctgcaatgataccgcgagacccacgctcaccggctccagatttatcagcaataaaccagccagccggaagggccgagcgcagaagtggtcctgcaactttatccgcctccatccagtctattaattgttgccgggaagctagagtaagtagttcgccagttaatagtttgcgcaacgttgttgccattgctacaggcatcgtggtgtcacgctcgtcgtttggtatggcttcattcagctccggttcccaacgatcaaggcgagttacatgatcccccatgttgtgcaaaaaagcggttagctccttcggtcctccgatcgttgtcagaagtaagttggccgcagtgttatcactcatggttatggcagcactgcataattctcttactgtcatgccatccgtaagatgcttttctgtgactggtgagtactcaaccaagtcattctgagaatagtgtatgcggcgaccgagttgctcttgcccggcgtcaatacgggataataccgcgccacatagcagaactttaaaagtgctcatcattggaaaacgttcttcggggcgaaaactctcaaggatcttaccgctgttgagatccagttcgatgtaacccactcgtgcacccaactgatcttcagcatcttttactttcaccagcgtttctgggtgagcaaaaacaggaaggcaaaatgccgcaaaaaagggaataagggcgacacggaaatgttgaatactcatactcttcctttttcaatattattgaagcatttatcagggttattgtctcatgagcggatacatatttgaatgtatttagaaaaataaacaaataggggttccgcgcacatttccccgaaaagtgccacctgcatcgatggccccccgatggtagtgtggggtctccccatgcgagagtagggaactgccaggcatcaaataaaacgaaaggctcagtcgaaagactgggcctttcgttttatctgttgtttgtcggtgaacgctctcctgagtaggacaaatccgccgggagcggatttgaacgttgcgaagcaacggcccggagggtggcgggcaggacgcccgccataaactgccaggcatcaaattaagcagaaggccatcctgacggatggcctttttgcgtggccagtgccaagcttgcatgcagattgcagcattacacgtcttgagcgatttccccggaatacagcgtcataagctaattatgaaaagttgcagccactcactacaggctctttatctgattgttcatcatcatgcatagctaaacccccttacctggagtggagactggcaaatctggtgtacttctgcgttgcagcctgtacgacttgctcagggagagagtgagtgagattaactcaacgcgagttcaccaaataagggggtttaagtatgcagaatgatatttgcggataaagagtcgttacctgtgtagatggcgcggcacgtcactctgttacgtagcccgttgctgacagatgccagcggtgcttgaaatgcacgaataataacctccttatgccagggctttaggcaatgaccgctgtccggggttgttaaagagcatgagatgacaagcgttctaacgggcgtcaaagagtgctcattttccaggcaatgagcacaaaaaacgcgatgaacgagctttttacaatcatctggatagtattgtgtgtgcgacatttaaaacctgtcaatgccgcgtgagcgatctaatgatctagataacatctaaaaagcagaataatattctgtttgttaaatgatgtacgatctaaaaatctagataatactgtttgtgtggtttattcgatcgtgtgagtgggtgtatgcagtcaaaaaaacttttttgaatatacaaaattctgaatttctgattttgtaaggttttgtatggggaacgtcagtaaagaaggggcttcagtagctgttctgaaaacgattttgaagctgtcagagatgtgtgctgaatcaaaaaggaaacgagccaggcttgaacatcgttgatcgattgcgcccatgctgctaaatttgcaggcaagttttccgcgatttgtaaatgcagaaaacgaggtgctgaaattttgttcaagaacgtaaatttcagataaagaaaacccccgtaatctcgtgttttccaggcagcgaagattagcgggggctgacatcaaggcagagccttgagcttatttatttcaggtatgcttgttacctgaagtggagtttaattccatgagaaggaaatatcaactcttacagtgcaagctaagtgcagcttgctgtgattagcaaacgtcactggtctgaactatcaccggaagagcagatccgtttctggcaggactacgaagcgggaattgaaagctcattcctggtcccccaggaaaacaaaggcggaacaacaaaacgtcgccggggtgaacattccactaagccaaagtgtgagaatccagcctggttccgtcccgacaactataaggcgctgggcggacagttgggccacgcttacaatcgtctcgttaaaaaagacccggtcactggtcagaacacactcagaatgcacatgtcgttgcatccattttatgtactgaaacgtcagagtgtcggtcgcaaatataaattccgaccggagaaacagcggctgcttgacgcaatatgggttgtacttgtgagtttttgtgatcgtggattgcacactgtcggcatgtctgtctcccgcctggcagaagaaataagcccaaaagacagtaagggagacgtgattcctgaaaccgcagtcacagtatcgcgcctttcccgtctgctggcagagcaggtttcctttggcacgttgggaacgtcagaaaagacgatatgggatcgtgaatcccgccagcgactgccgaaatacgtctggatcaccgaaactggctggaaaatgctgggagttgatctggtgaaacttcaggagcagcaacgtaagcgccttgcagaaagtgaaatccgtctgcaattgattaaagaaggcgttatccgcgagggcgaagaaatctctgttcactcggctcgtaaacgctggtatgcgcagcgttctctcgatgccatcaagtcccgacgtaagaaagcagcggagcgcaaacgtgctaatcgcctggcaaaactgccgtatgatgaacagcgaaacgaaattgcgcggtttattctgaagcgtatgccgccggacgaagcgtactggtgcactaaagaaagattagagcaactggtagccagagatctacgtcagcttgaactggctctgacagcttcgccaccccactag

SEQ ID NO: 159 - DNA, 5940 bp, Artificial Sequence
  plasmid pNA24
gtgtaggctggagctgcttcgaagttcctatactttctagagaataggaacttcggaataggaacttcatttaaatggcgcgccttacgccccgccctgccactcatcgcagtactgttgtattcattaagcatctgccgacatggaagccatcacaaacggcatgatgaacctgaatcgccagcggcatcagcaccttgtcgccttgcgtataatatttgcccatggtgaaaacgggggcgaagaagttgtccatattggccacgtttaaatcaaaactggtgaaactcacccagggattggctgagacgaaaaacatattctcaataaaccctttagggaaataggccaggttttcaccgtaacacgccacatcttgcgaatatatgtgtagaaactgccggaaatcgtcgtggtattcactccagagcgatgaaaacgtttcagtttgctcatggaaaacggtgtaacaagggtgaacactatcccatatcaccagctcaccgtctttcattgccatacgtaattccggatgagcattcatcaggcgggcaagaatgtgaataaaggccggataaaacttgtgcttatttttctttacggtctttaaaaaggccgtaatatccagctgaacggtctggttataggtacattgagcaactgactgaaatgcctcaaaatgttctttacgatgccattgggatatatcaacggtggtatatccagtgatttttttctccattttagcttccttagctcctgaaaatctcgacaactcaaaaaatacgcccggtagtgatcttatttcattatggtgaaagttggaacctcttacgtgccgatcaacgtctcattttcgccaaaagttggcccagggcttcccggtatcaacagggacaccaggatttatttattctgcgaagtgatcttccgtcacaggtaggcgcgccgaagttcctatactttctagagaataggaacttcggaataggaactaaggaggatattcatatggaccatggctaattcccatgtcagccgttaagtgttcctgtgtcactgaaaattgctttgagaggctctaagggcttctcagtgcgttacatccctggcttgttgtccacaaccgttaaaccttaaaagctttaaaagccttatatattcttttttttcttataaaacttaaaaccttagaggctatttaagttgctgatttatattaattttattgttcaaacatgagagcttagtacgtgaaacatgagagcttagtacgttagccatgagagcttagtacgttagccatgagggtttagttcgttaaacatgagagcttagtacgttaaacatgagagcttagtacgtgaaacatgagagcttagtacgtactatcaacaggttgaactgcggatcttgcggccgcaaaaattaaaaatgaagttttaaatcaatctaaagtatatatgagtaaacttggtctgacagttaccaatgcttaatcagtgaggcacctatctcagcgatctgtctatttcgttcatccatagttgcctgactccccgtcgtgtagataactacgatacgggagggcttaccatctggccccagtgctgcaatgataccgcgagacccacgctcaccggctccagatttatcagcaataaaccagccagccggaagggccgagcgcagaagtggtcctgcaactttatccgcctccatccagtctattaattgttgccgggaagctagagtaagtagttcgccagttaatagtttgcgcaacgttgttgccattgctacaggcatcgtggtgtcacgctcgtcgtttggtatggcttcattcagctccggttcccaacgatcaaggcgagttacatgatcccccatgttgtgcaaaaaagcggttagctccttcggtcctccgatcgttgtcagaagtaagttggccgcagtgttatcactcatggttatggcagcactgcataattctcttactgtcatgccatccgtaagatgcttttctgtgactggtgagtactcaaccaagtcattctgagaatagtgtatgcggcgaccgagttgctcttgcccggcgtcaatacgggataataccgcgccacatagcagaactttaaaagtgctcatcattggaaaacgttcttcggggcgaaaactctcaaggatcttaccgctgttgagatccagttcgatgtaacccactcgtgcacccaactgatcttcagcatcttttactttcaccagcgtttctgggtgagcaaaaacaggaaggcaaaatgccgcaaaaaagggaataagggcgacacggaaatgttgaatactcatactcttcctttttcaatattattgaagcatttatcagggttattgtctcatgagcggatacatatttgaatgtatttagaaaaataaacaaataggggttccgcgcacatttccccgaaaagtgccacctgcatcgatggccccccgatggtagtgtggggtctccccatgcgagagtagggaactgccaggcatcaaataaaacgaaaggctcagtcgaaagactgggcctttcgttttatctgttgtttgtcggtgaacgctctcctgagtaggacaaatccgccgggagcggatttgaacgttgcgaagcaacggcccggagggtggcgggcaggacgcccgccataaactgccaggcatcaaattaagcagaaggccatcctgacggatggcctttttgcgtggccagtgccaagcttgcatgcagattgcagcattacacgtcttgagcgattcgcgatccccggaatacagcgtcataagctaattatgaaaagttgcagccactcactacaggctctttatctgattgttcatcatcatgcatagctaaacccccttacctggagtggagactggcaaatctggtgtacttctgcgttgcagcctgtacgacttgctcagggagagagtgagtgagattaactcaacgcgagttcaccaaataagggggtttaagtatgcagaatgatatttgcggataaagagtcgttacctgtgtagatggcgcggcacgtcactctgttacgtagcccgttgctgacagatgccagcggtgcttgaaatgcacgaataataacctccttatgccagggctttaggcaatgaccgctgtccggggttgttaaagagcatgagatgacaagcgttctaacgggcgtcaaagagtgctcattttccaggcaatgagcacaaaaaacgcgatgaacgagctttttacaatcatctggatagtattgtgtgtgcgacatttaaaacctgtcaatgccgcgtgagcgatctaatgatctagataacatctaaaaagcagaataatattctgtttgttaaatgatgtacgatctaaaaatctagataatactgtttgtgtggtttattcgatcgtgtgagtgggtgtatgcagtcaaaaaaacttttttgaatatacaaaattctgaatttctgattttgtaaggttttgtatggggaacgtcagtaaagaaggggcttcagtagctgttctgaaaacgattttgaagctgtcagagatgtgtgctgaatcaaaaaggaaacgagccaggcttgaacatcgttgatcgattgcgcccatgctgctaaatttgcaggcaagttttccgcgatttgtaaatgcagaaaacgaggtgctgaaattttgttcaagaacgtaaatttcagataaagaaaacccccgtaatctcgtgttttccaggcagcgaagattagcgggggctgacatcaaggcagagccttgagcttatttatttcaggtatgcttgttacctgaagtggagtttaattccatgagaaggaaatatcaactcttacagtgcaagctaagtgcagcttgctgtgattagcaaacgtcactggtctgaactatcaccggaagagcagatccgtttctggcaggactacgaagcgggaattgaaagctcattcctggtcccccaggaaaacaaaggcggaacaacaaaacgtcgccggggtgaacattccactaagccaaagtgtgagaatccagcctggttccgtcccgacaactataaggcgctgggcggacagttgggccacgcttacaatcgtctcgttaaaaaagacccggtcactggtcagaacacactcagaatgcacatgtcgttgcatccattttatgtactgaaacgtcagagtgtcggtcgcaaatataaattccgaccggagaaacagcggctgcttgacgcaatatgggttgtacttgtgagtttttgtgatcgtggattgcacactgtcggcatgtctgtctcccgcctggcagaagaaataagcccaaaagacagtaagggagacgtgattcctgaaaccgcagtcacagtatcgcgcctttcccgtctgctggcagagcaggtttcctttggcacgttgggaacgtcagaaaagacgatatgggatcgtgaatcccgccagcgactgccgaaatacgtctggatcaccgaaactggctggaaaatgctgggagttgatctggtgaaacttcaggagcagcaacgtaagcgccttgcagaaagtgaaatccgtctgcaattgattaaagaaggcgttatccgcgagggcgaagaaatctctgttcactcggctcgtaaacgctggtatgcgcagcgttctctcgatgccatcaagtcccgacgtaagaaagcagcggagcgcaaacgtgctaatcgcctggcaaaactgccgtatgatgaacagcgaaacgaaattgcgcggtttattctgaagcgtatgccgccggacgaagcgtactggtgcactaaagaaagattagagcaactggtagccagagatctacgtcagcttgaactggctctgacagcttcgccaccccactagtttagctgcctgatacaatcggcactctcttcagccccttcggggcttttcgtgttgcctgcatttcatgaaattcctcatatttgacgaccgtttttcattttgtcccgctctgacagttttttgatggccgcaatagggtatcggagtaaaaacgccttcggttatccacaaaaacccgcaaaggaataacttcagaaagcagcaaacatagaacatcaaacccgcaatatattcttaacccctgttctttaatcccctgcgttgcttcgccgcagggaaaatatttatctttgaaacaactgtggataatcacaaaaatgccttcgcttgcagcggctaacgccgcgccgctcagaatataaaagtacctcccaccgcttcgcggcgggcatatggacttctgcctaatgaaaaacaaagcccctccaaccctcctacaaaaaaacgctgcaaatactcagccacagtgcccaacccatcactgaaaagcgccgccgcccccgcccaaagggcgggaacaacatcgctttcaataatggatgttgtaactaagaaatctcatcgctgtcagccttctggctggaagtaccaaatacacgctcgtaagcggccctgacggtccgctaacgcggagatacgccccgactgcgggtaaacccttgtcgggaccactccgaccgcgcacaaaagctatttcatggctgaaagcgggtatggcttagcaggatggggatgggtaaggtgaaacctatcaatcagtaccggcttacgccgggcttcggcggtttagctctgtgccatataaaacaacagagtgccgccttacatgccgctggcgcggcatcaaaaagaaagccccccaataacggggggaaatagcgttttgatcaaaatgataatgctagtgtgcttcttgcgtgccattccaggcacaaactaaatttaacgtttcgttaactacaaagaaatccgatgagttaatcacttgcggaataaactcga

SEQ ID NO: 160 - DNA, 2106 bp, Artificial Sequence
  plasmid pREC1
cggatcttgcggccgcaaaagaagttcctattccgaagttcctattctctagaaagtataggaacttcatagccagttttggggaagggttttggggaaagttttggggaagattttacatcatcataaaacaacgggcgtgttatacgcccgttatccatgggtatggacagttttccctttgatatgtaacgcacgttgtgcatcgatttgacaccctatcattgatagagttattttcccactccctatcagtgatagagaaaagtgaaatgaatagttcgacaaagatcgcattggtaattacgttactcgatgccatggggattggccttatcatgccagtcttgccaacgttattacgtgaatttattgcttcggaagatatcgctaaccactttggcgtattgcttgcactttatgcgttaatgcaggttatctttgctccttggcttggaaaaatgtctgaccgatttggtcggcgcccagtgctgttgttgtcattaataggcgcatcgctggattacttattgctggctttttcaagtgcgctttggatgctgtatttaggccgtttgctttcagggatcacaggagctactggggctgtcgcggcatcggtcattgccgataccacctcagcttctcaacgcgtgaagtggttcggttggttaggggcaagttttgggcttggtttaatagcggggcctattattggtggttttgcaggagagatttcaccgcatagtcccttttttatcgctgcgttgctaaatattgtcactttccttgtggttatgttttggttccgtgaaaccaaaaatacacgtgataatacagataccgaagtaggggttgagacgcaatcaaattcggtgtacatcactttatttaaaacgatgcccattttgttgattatttatttttcagcgcaattgataggccaaattcccgcaacggtgtgggtgctatttaccgaaaatcgttttggatggaatagcatgatggttggcttttcattagcgggtcttggtcttttacactcagtattccaagcctttgtggcaggaagaatagccactaaatggggcgaaaaaacggcagtactgctcgaatttattgcagatagtagtgcatttgcctttttagcgtttatatctgaaggttggttagatttccctgttttaattttattggctggtggtgggatcgctttacctgcattacagggagtgatgtctatccaaacaaagagtcatgagcaaggtgctttacagggattattggtgagccttaccaatgcaaccggtgttattggcccattactgtttactgttatttataatcattcactaccaatttgggatggctggatttggattattggtttagcgttttactgtattattatcctgctatcaatgaccttcatgttgacccctcaagctcaggggagtaaacaggagacaagtgcttagttatttcgtcaccaaatgaggcctccaaaacttcatttttaatttttgagctcgcttggactcctgttgatagatccagtaatgacctcagaactccatctggatttgttcagaacgctcggttgccgccgggcgttttttattggtgagaatccaagcgtcgacctagtcggccggcttgtcgacgacggcggtctccgtcgtcaggatcatccgggcggaggatattcatatggaccatggctaattcccatgtcagccgttaagtgttcctgtgtcactgaaaattgctttgagaggctctaagggcttctcagtgcgttacatccctggcttgttgtccacaaccgttaaaccttaaaagctttaaaagccttatatattcttttttttcttataaaacttaaaaccttagaggctatttaagttgctgatttatattaattttattgttcaaacatgagagcttagtacgtgaaacatgagagcttagtacgttagccatgagagcttagtacgttagccatgagggtttagttcgttaaacatgagagcttagtacgttaaacatgagagcttagtacgtgaaacatgagagcttagtacgtactatcaacaggttgaactg

SEQ ID NO: 161 - DNA, 64818 bp, Artificial Sequence
  plasmid TP114
attataactctggacacattacatgactcaagcaaaagctaatctgagaaaacttcgccgtgcacgttatgtcccccctcgaacagtaaagaaaagcatagcgaatacagaacgtgtcgtttcaaaagcaattaccggctgtggtgtcttccgtgatataccacaagtaaaaatcaatctcatcgaaacaaggaaaattttacaaatcgaactggctttatccattgctaacttatctgaggcgaatccaattgagatacgaaaaaaaatcaaaagcattgaccgacaattatcttcaacctcaaaaatcagaactacattatgaaaaaaaacgacgatttaatcactttaccacctcataacagccacgctctcgattacatcattaaaaaagcgtttacaccacgtaaaaccaaaacatcgacagcgacccacaacgtttatagttacaataaagaagaatccacattaaatttccaaaaaattggagaagcaatttttttcggcacagacctggtaattaagctgaagccaaatattagtgcctctggtgaactcttcatctgccagaaggactaagctatgaacattgtttcagaatttcttgagaaagtaacaaccattgttgaatccacagcggcgacgaacgccgctaaggtcgcacaggcaatatctcctacattttttgcggctatagccttatacgttatttatctaatatatgaaatcacgtatgcccaacgtgacatccttatgaacgaggtgacgaagaatatcggtgcattcgccctggttggtgcattcacttattcagcgccttattacagccagtttgttattccttttgtaatgcacgctggctccgacctttctgctgctgttactggaggttcaggaactgcaaccagtgttgataatttgtggaacgctctatctacgaatttaaacaacttccttgatacaagtatgagtatttatggaaagttccaaattgctgagaaaatgggggtttatctagtatgggggattggctatatcggcggaatgcttctcatctattacactactgttttcttgacactatcaactttcatggttggaattcttctttccgctggcattttattcatttgtttcgctctattttcatcgaccagaaatatgtttactgcatgggtcggcagttgtctcaactatatactgttaaatttattctatagcatatcatttagtttcttaattagtttcgttgaatcagttgtccctgttaatggagatataaaactatctattgtagtttactttttccttattactattatttccatattccttatagaacaagttggcacactctgttctacattaacaggtggggtaggtataaatggccttacatcagccgctaatggctttggaggtaaggttgcatctggttttatgcgagcatcaggactccgatctttcaccaatggatttgccagcaaaatgccaaatccattctttaatgcaggaagtcgttctgcatcagcattagttcagggattaaaccgtggaagtaaacttaaagcggggtgattaacatgaaagataaagtattatcatttctctttgctggaataattaccgtaacatcaccatcaatctttgcatctggtattccagtagtagacgttacagcgatagctaaaacagttgaagaagggctaaatcgtgccgctgaagcggcaagacagcttgagcaactcaagcaacaatatgaacagaccataagatacgctgaagaacagaagaaaagactcgaaggcttcactgatttcagcaatggctttgatagcgcatccagctatatgaaggattctctatcaacaataacaaatagtgcaaaatcagatcttagctctttgcgatcgcaatatgacttatcaagcaacattgcagagacgcaacaaaaatatgatgcaatcctggctaagatcaaattctatgaaaatttcaacaatgaaatgcaggaaagggctaagagattaaccacgttacagaaggagttcgcgtcagcagatactccgcaaaaaaaagctgacttatctaaccaattgaatacagaaaaattgacaatggagctacaattgaagcaatatgatattgcagagagacagctaatcgcgtctgaaaatgcaagacaagaggctgttagtcgagaaaagtttaaattaatgatgcaataggtgttcgaatgaaaaaattcataagcactttaactatcttgtcatgcttccttttagctgcttgtgaagacaaagtttatgatgtcagttactacactgaacatcttgaacaagcccaagatgttgtcgaaaaatgcagcaaaggggatatgtctggtcaaaactgcgaaaatgcgcgtgaagccattcaaaaagagcaatcgggtaaagcatttaaaaatatgatgcaataatccttcattaaaaacagctcgcaaagcgggctttttttggctgtacgcagtgaccagttgataaatagttctaatgttcgtgctgcattagaacaacgcacaaaaagaagagtacaagaagacagtgcgggatctaatggaacgtttacaatagaatcaccttccctatagcaaggtgattctatttaaaagaatacccgcctcgtgcgggtcttatcttgcttaaagatctatgaaacctccggcttcgggtattaaactataacttgctttggcaaatattgtttcattgacttcatggaatcttattttctccgcctgttcatatgttacagggaagaacacgccccctggctcattaaacatcataaaatcaccttgcattgcgttacaatgacaacaatgattcgcgtaatacttcatttttgctgttttgctatgggatggataatataattttgaatactcattaatccttgagagagcagaggttgaaattatttcaattttcgttaaatcagtccaccatactctactggttaaccaccgataaatcatatttttctttgaatcaaaatactccatacccttaggggaggatgtttcataccattcatctaatatacaatcttcccattcggcaggatcaactccccaaataacgtctctatacttataccaacgaggcaaaaaaacaccaaacacaggagttattttcttacagcgccaacatgactggtaactttccgcaatataaaaacgttgagaaaaaatattgtaatcatgttcgtttaattcttttacccactgaataaaataaattggatttttcccctgtggaacaaaccatttccgttgttcttgatcccattgcgcccctttttgtttggctaactccttttcttcaaaaggtacatttaaataaaaccgcgccataaccaacttaactccagtattctgttctgatgatgcaacaggatagatatcaaaactaaacaaagagtgcaattccgcctttaatggctcattcgtacccgcctcgtgcgggttttcttttgcctgaaatatggaggaactccatgaaatccatcattttatcgatggttgccgccaccgcattactgtcaggctgcgcggatagcaaaacacaaccagtacctgagtcaccgttaaccaaacatgaccatcagatcacgttgaaaattgataccgtgcgaacagacctgccggacagttctcctgtttgtttgaatggtatgaatatatacgaaagtctgagcgagcggcatccaggcttgtttgccaaaaatcagaacgtgattttccgtagtgcattctttgatgacggtcaggcgatatcctccgaaacaatccgcaaaataatgcagagtaccccgtgcgttgaatcacaaacaacatctgccggaagctgggaacctgccacggaactgctcccccgtcaggcaatatccggtgacactacactggctgaaaaagatcggactgctggcttcacaatgcggatagcaccggagattgagcgtggaaatttccacctgctactcacaaccactgacccgatacggaaacagactgtcgagcagaatattttactcaaaccggaccagccccttatcgtgagtggttttactggagttaatgctgatagccaaagtgagaaccggattgtcatcattacgccacacgtgcgttgattcccctgatatttaaattacccgcctcgtgcgggttttcttttgtctgaaatatggaggaacaccatgaaatccatcattttatcgatggttgccgcaagtgctatcgcactctctgcccccgtatatgcgtctgatccgtgtgcttccgttctttgtctgtacggtaaagctatcggtagcggcggcgggagcgaatgcaaaagcgccgaaaaggacttctttaatatcataaaaaagaaaaagggatctattcgctggagcaaaacctttgatgcccgaaaagcgtttcttaatcaatgcacgaccgcagaccctgcggcgatctcaaaaatcatgagtaagttcggacgttcctggggttaaccatgaaaaagctcattattattcccaccacattattgctgaatgcgtgttcccatgcccctgaacccgcacaggcaaaaggaggttggtatgaactgaataccacaattgagcaggtaagagcagacacatactataacggggtgatccttcagcagcccgtgtcacagccaaacagcactgttcaatacagcaatgataattatctcaaaaaggaaaccataaacgtaactcccgcgcctcgtattgcagaaaccgtaaaaccacgttctgagcaatcagcgacagcgccaaaaaaccagggcagcaataatagttttctgaagccgacaacaaacagcataacttcatctggtgagataaaaacagcagccaaaggagcaactaaacagcattctgaacaaccagcactctctcccgcaaagccaatcagtagcaacaaccatcaggcacaaacggcacaaaagactgatcagcagacaaaaccgcgtcctgaacaaccaccgctaatgtcaaaaagcggttttctgaaaaaaaacgctaacaacgctgttccggccaccacgcttacaggcccatcaacacctgaaaagcaaatttactttgttcgccatgatggtaaaggctcgctgcaaaaagcattaaaagaaattgtcccatcggactggacggctgaaatatccccggaggtaacgaaaactttccgtcgcacgatatcctggcagggcaacgatcaatggccttatgtcctggataaaatgcttcgcaactacggtctgacggtaattaagaacaccgaaaaaagacatcttctgattgattttcaacaacagaaagggaaaacatcacaaaaagcacctgtatctcctgacaaaacccctgcatctcctgtcaggacaccagtttcctctgacaagttacctcaaaaaccgctaacgcctgtcaccgttccgcaaaaacagacagaaaaactcacctggaatcttaaaaaaggttcgacgctgcgggatggcctcaccgaatgggcgtcaagttcaccgtgtggtaattcaacctggaatcttgtatgggatactcctgtgaactacagaatagatgctcctcttattttccggggaaactttgaatctgcattaaaagatacgctgatgctttatctttcagcagataaaccgttatacgcattcaggaatattgcacaatgcgtaatcacaattaaagacacacaacaggagtaatcgctatgggttggttcttcagcttgctcctgatattcctgtcaataggcagttactatctgacagataacaataaccaaaccatacagcgaatgaagttgcttcctgcaaaacaggaagcaattgaatttgtccatttcgcaaatgttatcaatgactatctttataaatatccagacaaacgtaattcaggaggaacgttaacatctgagcaaatcggtataacacccgtttatgatattcatcatattatttacggtaagcgagtttatatctggtctgccgatacagaaggtctgatgtctgctttgcagcagcaaacaaaacattcagcaatgttaggaagagtaaaaaataagaagattgtcgataatcaggggaatgatatgggcgttcccgttccttcctccattccagaagaggctattgtactcattaactaaatatcccctgacaaggggattctgaactggagtctgcatatccgacacatcattatgtgggccggatatatcgctacggcgcggacttcagtccagaaaatctttaccggagatacccatgcaggataatgatgatgtcagcgagcttgatattgccactcgtgaagtccttatcttacgatgcaatcttattcagcttgcttctgaatatataaaaataaatcctcttaaaaacacccgaatctacacagatttaattcatcgttcagcagatgttatcaaaaatatcgaacaaggtaacatccagaataaacataattatctgtcacaggatgtaaaacatacgcttgttttatacgacctgtacaaatcagactttgaacaatgtccgggggcaaaatcccttatacctgtcagggaaaaaattgtctcgctgaaagaacttctttccggcgctaatgagctggacagtatcgttcgtcgcccccgcaggaaaaaacgttcttcacgaatttaatatcaggagataaatcccttatgcagttatcagcggctgttctggcagcactgataagtcagtgtgcccctgatgtatcacccgatacgatgaatgccctgattatgactgaatcaggggctaatccatatgtaatagcgaatgtttctgacggaacaagtaagtattttaaagatgaaaaaggagctattgaatatgcagaaaaattaacagcagaaaataaaaggtttagtgcaggtctgacacagatatacagcaaaaatttcccatcactcaatctgactaataaaacagtttttgacccgtgtacaaatataaaagcaggagcggcagtcctgacggacaattatctgagacaaaaggagggtagtagtaatcaaaaaattctccgcgctttatctttgtattattcgggtaacgaatcaacaggatttattaaagaaaagaaatttaacaacacttcttatctggaacgggttattcgtaacgcgaataactatatcgtgccatcaatccgtgaaaaaactgatgaatcagaaataaaacccccgaatgatgaagagaaaacatcaccggactgggatgtttttggagattttagttaatgaaagtcaaatcaactttgcagtattttatcctggcgtttttcctgtcactaactgcctccgttgcctatgcaggtggactcgataccgcaacaaataccatgacagaacttaagacatgggcatttagctttggtggtgtttgtgctttgtgttacctgatctataacgtcatcatggcattcatggagaagaaaagctggtctgatgtaggaatggcgcttgtctattgttccctcgctggcggtgcactttacgccgggaactgggcgctggaactcttcaaataagtaatccatatatacaactgtgccgcatatttaccttatgtgtgaattgcggcttttttcatggtgagttatggacaaagtaaatgaacatgtcagtgagtcattcatgacttataacgggtttaaccgtcctgcgttaattgctggtatacccttaatgttgttattgttcacggcttttttcgctgttctgacaggcttccccgctattttcctttggggtataaaagggataattattcctgtcatatgtgcgctgtttctttttatagtaaaactggcctgtgaaaatgactcaaacgcactaagagtcatccgtttaaaccttatggggcttttgttaaaaatccgccacagagatttaattattggttattcatctgtcaggtaacatatatgcacaaaatcaaattaaaaaacagtgacaatatggatgttgctcgtgaatatcccgattatcgcttccatataacagacagtattatctttacttctgacaggaaaatgctggcttcacttgttgtagcaggcattccatttgagacagagaacgataatgttcttacaaatttatttaacagcgttaaaaacttcctgattgggttaggaaaggaaggcgacctgtatttatggactcatcttatcaagaaaagagcaaccatcaatggagaatggaattttgacaatgattttttaagcaggttttcaaaaaaataccttgctctgttcacatccagcgcattctataaatcaacatggtatctgacatttgggattccctacgatgatgttgataccggaatcgagcgcatgaatgaaatgacacaacaggcgcaaaaagcacttctaccatttaacgcttctttattatccgtttacaatacttatattagtgaggtggcagactatctatcactattgctaaatgcagaacataacatgattcctttatcatccacccccttatcatccagtatttgtgattctgaatggtattttggtgctgatgttcttgaactgcgtaacaacgaatcggatagtaaaaaattcgcaacgaattatattttgaaggatttcccgatagaaacaacccccggacaatgggatttccttctcaaacaaccctatgaatttattcttactcaatcctttatttttgagtcaccaacaaaaaccctgaagaatatcgattcacagttaaacaaactacaatcagctaatgatgcagccaaaatacagcaggaagaactcgaagctggtaaagaagcggtcgcagccggaattacgttgtttggttcactacactgcgcattaacggtattcggtgatacaccagatcaggccagaagcaatggtataaagctctctgctgagtttattacttcgggtaagggattccgcttcagtcgcgcctcactcgcatcaccttttgtttttttcagtcatatgccgctgaataagaggcgtccactggatacccgaagaacaattaccaacctggcctgtctgatgtcttttcacaattattcctccgggaaaaaatcaggcaatcctattggtgatggctccgccataatgcctttaaaaacggattcaggcagcgtttactggttcaatacacattacagcccaccggaaaaaaatgttaccggacaaaaaattgccggacacgcaatgtttcttggcgcaacaggcacagggaaaacaacatttgaagcaacagccagcggctttcttcaacgctttgaccctttaatgtttgttgtggattacaaccgttctaccgaactttttgtccgcgcatacggagggagctatttcacattgcaggaaggtatctataccggctgcaatccgtggcaactggcagaaggcccggaatcgcccgtctggcacagacttctcgcatttctgaaacgctggacacaggttctggcacgagacaaccagggcaacccctgttctgatgaacatggcattgaattaaacgctgccgtggaaagcattatgcgaatgcctgtcgaagaacgccggacagcccttcttctcgatatagtcagtcctgaacttcagacgcgtctcgccaaatggtgcgacaacggcgaatatgcctgggcggtggattccccccggaataccttcaatccactgcatcataaaaaagtgggatttgatacaaccgttgtcctggacacaaaaaacggtattcatcctgcctgtgaacctttactcgcggtcctgtttttctacaaagaaatcatgcaacgcggcggcaatctgatgctctccattattgaagagttctggatgccagcaaactttcccatgacacaaagcatgattaaaagcgcactgaaagcggggcgcatgaaaggtgaaatgatgtggttaacatcacagtccccggaagacgccataaactgcgcaatttttgcggcgctggtacaacaaaccgcaacgaaaattctcctgcccaatcccgatgcaaaatgggaaggatataaagaaattgggcttactgaaaaagagtttgaaaaactcaaagagctgacgaaggagtcaaggaccatgctcatcaagcaatctggctcttctgttttcgccaaaatggatttgtttggattcgatgagtttatccccgtgctttctggctctgaaactggcctgtctatttttgatgagattattgctgaaaaaggagatgtagctcctgatatctggataccagaactcctgaaacgcctgaacggttaatttctctgttttatacagaacggaaaacaatatgaaaatccccctcataattgcctccgcgctattaattagtgcatgttctcacacccccaatcctgtgcagaaaaaagggggatggtttgagttaaacacagcaattgaacagatcaaagcaggtgattattaatggaaaacacaaactattatgaacattcaaaaaaagaagccaccaaaaagaaatttgaagaaaaaaacgaaaaaaaggattatttcaaggccatacgtgactttgagcgcagtgaaattgaaatcataaagaaaaaggcaaaaacatttaccattctcgccattggtgaatttgttgtaatttgcattcttggtttcgcaatagcctcccttgctccattaaaaaccgctgtaccgttccttgtgcgagtggataacagcactggatatactgatattgcccctcaattatctgatgctaaggaaagttatcaggatgttgagactaaatatttcctgtcaaaatatctcattaactatgaagcatacgactggcagaccatccaggaacaggccgatacagtaaaaacaatgtcttcccaaaaggtgttttcagcttatgacaccatgattcgtgctgattcctcaccactgaacattctgaaaaacaactacaaaattaaggtccagattaattcagtaatccttctaaggaaggatatggcgcaggtgcgtttcaaaaaaatggtactggatttatctggtaaacccgcccccggatacagagcaacagagtggatttcgacgatttcttttgactgggataaagatatcaaaacagaaaaagagcgccttgtgaatccgctgggactgcaagttctgagctaccaacctgatccagaggttataaaatgatgcttaaacgcactactgcgatagttcttttgtcgatgctacaagtacctggtgctttagcagctatgtacggcacaccatcggaacgagacgggcgtattcagaccgtagattataacgagcaggatgtatttaatgtgcgcgtaaaagcaggcgcacaaacaacaattaagttcggacaagacgaaacaataaaagatgtcggaattggtgatccagaagcctggtcagtatcggtcagggacaacactctgtttctgcgtccaaaagcagaagaaccggatacaaacgttaccgttcagaccaataagcatatatatcctctttacctgatatcaaccacgaaacaacccacgtatattctgcgttttaattatccgaaaccaccgtcagctaccgtaatgactgaaaagccatttccatgcactgatggtggaataattaatggtcattatcaactcaagggggacaaatcaattttcccttatcaggtatgggataatggcgaatttacatgcatgagatggactaataaacaggaaattccggtcctttatcgtgttgatgccgatggaaatgaacatctggttaacggagacagaaataaaaacacaatggtttactatgacgtggctgaaaatctccgtttgcgcctgggtgatcaggttgcagatatcagaacatcatcaatcgttaatcgtccgtggaataaaaaaggtacgtcaaacggaaaaacacgagtagagaagttcagctatgaaaaataaagatgatgaaaaaaataatgacgcgggaaatcgcggaattatcgaagtaaaaggtaaagcagcaccaaaaaaaatattaatcctcatcatattactgattgccgcgttatttgtgatcattatcttgtttaaagttctgtcacgagaacaggtcgttcagcaaacacctcttgagaagtctgacgagacactggtcacaaataccaacaatggcgtttcactgacaacaatgatgaaaaacatcgaagaaaaggaaaaactcgatgccgctaaccgcaggaaagcacaggaggagcaagaacagaaacaggcagacaatgccccgtcagcgccagcatcacaaaaggccgatcaaacagccgtcaatgtgatagccaacggcactccccaaaccgccagtggagatccaaaccaaccacaaccattgccaaaatccgtccgacaactgatgggcgacacaatggtgaagatcgacaatcaggaaccaggcgaaaaaaaccaggaaagagatgatttacagggcagtcagtacgcagacggaaaggtatcccctgtgctgaaccgccgatatctgttatctgcgggaacagcattatcctgtgtgctcaaaacgaaaatcgtaacctcttatcccggtatcacaatgtgtcagttaacacgagacgtctggtcggataacggcgaagtgcttcttgcccgtaaaggagcattactgatcggggagcagaataaagtcatgacacagggagtagcccgtgtgttcgttaactggacaacgctcaaagatgaaaatgtcaatgtgcgcattggcgcacttggcactgacagtctgggtgcttccggccttcctgcatgggtcgataatcattttggtcagcgttttggtggtgcattgctgctgtcattacttggtgatggtttagatattctgaaaaacagcacgcaacaaacaggctcaaacagcaatatcacctacgaaaacacatctgacgcaacaaaagaaatggcaaaaacaacgctggacaatacgataaatattccccccacggcatatattaatcaggggactgtattgtctgttattgttccgcgaaatatcgacttttcatccgtatatgaacttcagtaattcagtaaagcaattgatatgaataacatcagagataccagtaatacatcacaaccacgagataacagtaaaaccgcaagacgatatctggatatgacgggtatccagtctgttcttaatattgaacatgtcacagaaatatctgtgaataaaccaggaacaatatggtttgaaggaaaaaatggctgggaatctaaagatgcgccagacgcgacttttgataatttaatgacacttgccaaaactctgacgaacttatcaaagataaaaataccacttagccatgataatcccattgcatcggtagttcttcccggtggggaacgtggacaaatcatcattccacctgcaacagaaaataacagcgttgtgatatctatccgtaagccatcattaacgcgctttactatagatgattatgtccgaacagggcgttttgataatgtcaggattgcgacgaaacacgaagccatcctgactgaacggcaacgctacctgtatgaattatcccggcgtccagatggtcaatctaaagctcaatttttaagagaggcagttaaagaccgtcttaattttttaatcgtcggtgggactggctccggtaagacaactatagcaaaggcaattgcagatatctttccacctgaacggcgttatataaccgttgaagatgtaccggaaatgtctctgccgctgcatccaaaccatatccggcttttctacaaaaaaaataccgttgaagcgaaggaaatcattgaagcgtgtatgcgattaaagccagatcacatctttcttgctgaacttaggggtaacgaagcatggagttatctggaggcgcttaatacagggcatgaaggctcaatcagtaccattcatgctaataatacttatgcctcattttcacgactggcaagtattgtaaaacaatctgatgttggtatgactgttgatatggacctcatcatgcgcacgataaaaacatcaattgatgtcattctttttttcaaccataccagaatgactgaactgtattacgaacccgaagaaaaaaatcgctttttgagcacaatgtaaattctggagataactatggatgcaaaaaagacggggggattaattctcttcctgttactgcttcttgtgggtgtgcttatagcctcaaactatctcggtggatacacagcattaagatattcatccgttgatatgtctttgctcaagtgggatacattccattctgtaatctcaacattttctggcaacccacaatataaaaaactcgtttttatggcatggtttggattcagcgttccattaatattctttgccatattcatgttaattgtcgtgattgggattatgcctaaaaaagtcatctacggtgacgcccggctcgcaactgatatggacctaagtaaatcaggttttttcccggataaaaaatcaccttacaaacatccaccaatactcatcggtaaaatgttcaaggggagatacaaaaaacaatttatttatttcgccggacaacaatttttaattctttatgccccgacacgttctggtaaaggggtggggattgttatccccaactgcgtaaactatccaggaagtatggtcatactggatatcaaacttgaaaactggtttttatcagccggattcaggcaaaaagaattagggcaagaatgctttctctttgcgccagccggatacgcggaaactatcgaccaggccattaaaggacagatacgctctcaccgctggaatcctcttgattgcgtcagtcgcagtgatttacttcgtgaaacggacctggcaaaaattgctgcaatccttatcccggcaagtgatgatcctatatggtctgattctgcacgaaacctttttgtcgggttaggactttacctgctggacaaggagcgttttcacctggaacagaaagccaaaggtcataatgtaccggacgttcttgtttccatcagcgccatactgaaaacgtcggttcccgatggcggcaaggatctcgccgcatggatgggacaggaaattgaaaaccgtagctggattagcgataaaacaaaatcattcttctttaagttcatgtcagcaccagatcgcacaaggggaagtatagaaacaaacttttcatcaccgctgagcatcttcagcaaccctattactgctgaggcgacgaatttcagtgattttgatatccgggatattcgtaaaaagcccatgtcaatttatcttggtctgacaccggatgctttaatcactcatgagaaaattgtaaaccttttcttctcattactggttaatgaaaactgtcgtgaactgccggaacacaacccggacctgaaataccagtgtcttattctcctggatgaatttacatcaatgggtaaatcggaggtcattgaacgcgctgttggttttacagcaggttataaccttcgctttatgttcattcttcagaatgaaggacaagggcaaaaaagcgatatgtacggtcaggaaggatggaccacattcactgaaaacagtgctgttgtgctttactatccgccgaaatcaaaaaatgctctggctaaaaagatttcagaagagattggggtgcgtgatatgaaaatatccaaacgctcaatatccagtggtggtggtaagggaggaagttcacgtacacggaatgatgatgtaatagagcgcccggttcttcttcctgaagaaattgtgtctctccgggataagaagaataaagccagaaatattgcaatccgtgaaattataaccagtgaatttagccgaccatttattgccaacaaaataatctggtttgaagaaccagagtttaaacgccgcgtggatatcgcccgtaacaatcatgttgacattccaaacctgtttacacaagaagtcatggatgaaatagcaaaaattgcagaaatttatctccctaaagctggaggaaaaaaagtcatggttgccggaggcaatgtgattactaatccagaccttgataatcacgataaaacagacgtatctgaataatcctcgcaaccagcaaatagtattttgcatattccataaggtaattaaacatgaataaaaaattgctttgtttattaatatcctcttttttattatcaggctgtgcaaacttcaaaaaaatcaatgctaatgaacttgctgccgaaagagacgcacaaaaagcgactgaatacgcgaaaaaaattcgtaataacccggttatccaggattcaacaaaacaatggattaatacaacgccaattattgaaaagcaggtaaagcaatcagcgccgccctgcccgattgtgattaatactcgttcagatattgagctacgccagatcgcacaacgcatcacacaaacctgtcatatcccggtacgaatcagcgccgatgtctggacctatctgaacggtacaggcactggctcaacacaacaaatgacaggctcaattccagcacctgatgcaaatggaatggttcctctggcgtcagtaggcagtcagccagtaaaagtctcttctggcggtacatcactccctgaactgaatatctccgggcttcctgccctactgcaaaccgtatcttcacggctgggaatatcctggaaatacgataaaggtcgtatcacattcttctatctggaaacgcgctcattcccgattacatatatggacagcaatgtggcatacaactcaaaagttgtgagcggcacaatgtcttccagtggcagtaccggctctacaagttctggcggtatgactggcgacgcatcaaatacgcaaactacaaccgtggaaatgaaatcatcgctgtacaacgacctgaaaagcgaagtttcctcaatgctgacaccaggtacagggcgcatgtatctgtccacaggttcactgacagtaacagataccccggatgtactggacagcgttcaggagattgtgaacaagcgcaataatgaaatgagtcgtcaggttgtgctgaacgttgaaatcctgagtatcaagaaatcaagccaggaacaggcgggaatcgactggaacgcagtatttaatgatggtcatcttggtctgagtcttggtggctcatttggtgatgccgccgagaatgttattaccagtggtgtatccatcgtggacggtaagctggctggctcaaaagcatttctgaaagccctgtcgtcacaaggcagcgtcagtgtcgtaacgcaaaactccgctgtgactaaaaacctgacgcctgtccctatgcaaattgccaatcagcagggcttcattgaaagtgtcacaaccgattctaccgccaatgtgggatcatccacgtcactgaatgcggcaacaataacaaccggattcaatatgactctgcttccatacattcagccggattcacaaaacctgcaattgctgttctcaatgagtctgtctgacaaacctacttttgaggtgttcgaaagtggcggcagtaaagcacaaacaccgaatgtggatttgaaaacaattaatcagactattgatctgaaatcaggccagacagtcattctgagtggattccagcaatcaaaccggaaaaccagtaagcaaggtgtaataaccccctccttctttggacttgggggtggcgttaacagcgaagacggcgacacgattctggtcgttttgattacaccaaatgtgcttaattccggctccagtgcagtaataaaaaatgtgaactaattaactgaaaactccctgaaaaaacacagggagtttttttggaggtcactttgtctgagaataatcagaataaccagaatttcacttcggttattaaaaacaagcgtgcttttttctccggtctggactggaaaacgcttccttcagaagaaaagaatgcgcgtacattcgcaagaaaaaacgacgctgaatattttctctcctgtcagtatcaggattcagaaaatgaaaccaaaacgatggtggcatttatcagaaaagaggatcttcccacaggggcgtcctcattctggtcactggcactgatgataaaacccctcatcgaacctgacggatacgctatctgcgaactcggtgatctttatggctttgtttcctgcgtcaataacgttctcgtcaacgatgttgtaggtaacaaaagtcagatcatgagtgctctgacaacatttcttgagtttaatgaaacaccagaacccggctggaaactataccagcctgaatcatgggatatcagccaggcactcccctcactcactctgtctgcgttgattgacgtaaaaaaaccgccgaaagaggcggcgtttactcgcgtatcccgaaaacgtcagttcatgatttatggcggaagtgccattctggccatactgctctggaacgggatcaccatgtaccaggaataccgggaaaaagaagctgcggcagaagctgcacgtcttcgtctggcaaaagaaatggcagacaaacaggcaatacagattgccccaccgtggcaacatttacctgaaataaaaccatttattgataaatgcattgataaatgggatgcactgcccttatcgatcgccggatggcgttttgaccttgctgaatgcagcacatccggtaatgacgggctgttacgcacatcatataaggaactgagcggcgttacggtcgaggacttcagcacacggatacgagaaatattccaggggacaaccacagcaacttttgtattgccagaaggcagcgccgggggattttctcttcctgtcagttttgacgtttcgcctgatccaattaccccggacacattgccacaggcaacagatattcaggaacgcctgacaacatttgcacaaaaaatgaggttaaaactcacctggcaggaaattgaaaacacaaaaacagatgaagaaggccgtccaataattctcccgtggaacgagtatgaattaatgattcagaccagcaccccgccttcaatacttttcgctaactttcatgaacctgccgttcgcttccagtatgcaggaataaaactggaagaaggaagactgaattatgagattaaaggtgcattctatgttaaaaataattaaaccaacgattatttctgtctgttttttcagttcacttgcttacgcaacagaatctgaaagcacaccaaaagacgaaataaaatattcatctccgaccattttacaggtagagcagattcaggctgaaacggtaatttacgaagcaaagctggcgcgtcagaaggctgtcagtgaattgcgtaatcttgatttgaatggtgtagcgtccgcaacgccagcaataacgccctcttccgggtattcttctcttgcagataccgatataccagcgcaacgtgtagccgctaaatcacttcgtgttattgaaatatttggtacaccacaacaaatgtcagcacgaatttctctcctggacgggtcagtaactgatgtcaaggtcgggcaaagtattcctggtacttcttataaggtggcatcaatcactggtaatggcgtctggattcagaatggtacagagaaacgccagcttattctttaatgctattgaaagagacgacacataatgtttttttctgacgcagactatcccggaaaagatatttctgatgttgtatacgtcagtatatctgaaaaagacgataaacctgttcaggtttatatcgctgataacagtaaaggacagcgtgctgttcaggcttatattggcactctgaatgttaaatatcccggacaggtaaatataacctcgacaactcttgatgttatcgcatcccgctaccaggacagcgaaaaaaggtctgattcaaactcatcacaacacttaaacagcaaccaggaaaaggtcattagctacctggcgaaagcaaacaaactgggaagttccgatttgcacatcacacctggtcgggacggctccgagttcacttatgtcgaagcacgcgtgcatggggaactggaaattctggatgtcatcccgcgtaaagaagggctggaattgctgggtgctgcctattctggaatgagtgatgttatcaaaggtacgcagtttgaccctgcaataccacaggatgcacgtatcgcagagaattttctgaagcctgtaaatctttttggggcgcgctattcgcattatccgtgcgtgggtggtgtgtacgcggtcttccgcctgattaaagatgacagcgaggatattcccactttcgaagaacttggctacatgccgcaacaaatccagacaatcaggcgaatgttacaacgcccggaaggaattatcgttttatccggccctacagggtccggtaagtcaacgactctgagaacggcttcagaagcctatctgagcacgtttggtttcaaccataacgataatatgcgtctcccccgaaaacgccttttcaccattgaatcaccgccggagggccgcattcccggcgcaatacagacggcagtcagggattccgtcgatggctgggttgacgcgattaaatccgctatgcgacttgatccagacgcgatactgaacggcgaaattcgtgatcacgcatcggcattagcagcaatcaaagcctcgatgacaggccaccttctgttgacgaccttacacgccaacgatgccctgaatattattgagcgccttgaaatggagaatattcaggccaggctgattgcagatcctcttctgtttatcggtctgctgagtcaacggctggtacaaaaactctgtccttactgtaagcgcacttatgctgaaatggcagacaaactgagtacagaagaacggaaactcattgaggaaaattgcctgccggaacaggtccggttgcgcaatcttgacggttgcgagcactgttataaaggcgtaacgggaaggacggttatagcagaagtcgtctcacccgacgcacgtttttttcagttatatcgtcagtccgggcgtctggaagcaaaatcatactggcactatgaacttggaggaattacccgtaatcagcacttattacacctgattaatcatggcctggtagatccgctgtccgcacacttcatatcccccattgacgaagataaatactcaatgctcccggaggggacatggcgataaaagatatatttgagaaactcaattcgatagaaattgatttctctggaatatcccactggctggcaaaatacacattcaggtattccagaataagtttatatgaagatttatctggaatgttaaatgatggcataaatgtaaagcgtgctcttacacacctgattgatgtagaaacagactacgggaagaaaacggggtcttctgcaacctactatatttgttgtgagtgccttaatgcactgaataacacaggggctatatcttcagcattaaaaaaatatataaaggaggatgaatatcaattaatatccagcggtgaaattcgcggcgaccttgccggaggattagttcaggccataaaaattgtcagaagtcgttctgaaatgacaatgactcttgttatgtcgatgatttatccatccgtactggtttttggttgtctggcaaacatgtatatggtccacgataccataacacctgttttcctttctctcgcaccgaaagaacgctggacaagttctatgcgattactgacagatacgtctggtttcctgatagaaaacggaacgtatattctctgcttctgcatcgtactgtttttcctgatcagatattcgcttgcgcgttatacaggaccgggccgtcagtatcttgattacattcccccctggtcactttataaaacatttaatggtgtaagttttctcttcaacatggcctccatgttaagtattgatattcccgttgcaaaagcactggaaaggctggagaaaaacagcactcaaaacagatggctactcgaacgaataaaagaaatcaggagatatgttttacttggacagtcacttgcaatggcaatgaaaagttgcggttatgacttcccatcgaaattatgcattaacaaactattacttcattctgaaaatgctgacaatgcattgatgatgtctaactatgctgataaatggctggaggaagcaaaaggaaaagtcaaatcaacaggagtctggataactgtagtatccgcattaattgttttcgcatttattgtaatgatgattactgctctctacgatgtcagtaacgtcctgcaacactaatccctaatatttttaacctctcaataaataaggaattatttattatgtcttctattaatattttaaatatgcgttctgttttttcttctctttctgcacgccgtaaaaaagaacaggacaaaggggcaacactgatggaagtgttattggttgttggtgttattgttgtacttgcagcaagtgcatataaactctattcaatggtgcaatccaacattcaatcatccaatgaacaaaacaatgtcctgacagtgattgccaacatgaaatcactgaaattccaggggcgttatactgacagtaactatattaagactctctacgcgcaaggattactgccatccgatatgatcgcagatacaactggcgcaagcgcgaaaaacccgtggggcggctccgttacaatcacaacctcttcggataaatactccttcaatgttgttgaggccagcgtaccgaagaaaaactgcatggcaatggtaaacgccctgcgttcttccagcgcaatctccaagattaacaacacttccacatcaactgtcgatgcggcaactgtttgctcatctgacagcaatacgctgaccttcagcactgattcctgatttttcatgtgcatcggataagcgccttcgggcgcttattttttccatgtttacaggaggagtattgtgcgttctgttctttatatcctgctatcatgtatttcatcattaatcttttcattgcaacccgcatattcagcgacaacgacccaatttgatgcctgctttgcacaagccgggcaacgttatctgattgatcccctgcttctgaaaagcattgccactgtagaaagttcactcataccagaccggataaatcacaacaaagaaaaaggaaaaatattaagcaccgattacggactgatgcaaattaattcatcacacatccccaacctgaaaaaacttggcgtaataaaagacaaatcagagcttattgataacccctgtctcaatatacaaattggcgcgtggattctggcaacacattttcagaaatgtggcataaactggagttgtcttggcagttataacgctggtttcaaagaaagtaacgaacagaaaagaatcaaatacgcacgctatgtctacaataaatacatggtaaggtaacttatgctaaacagcatatttaatacggcgatactttgctgtgcaaatatcgtctgtcaatgctacgcctacaatgaagtaaaattccgtttaaataaacttaatgtatcttataaaaccggcacagagaaatattactgtctgatactgacaacgcttgccgttctgtatctttcattaaaccagctatcactgattcaatctataatagtgattgttttctatgctttccttacattaatggcttgtatagaccttctttcatttctactaccacgcctttataccgtgacatttatcttctctggcctgttatatcagacatggaataacaatatattgtctggtttgttttgtgcaatgctgatgttcttcattatgctgtttgtaagactttactttgcatataaaaacggaacggaaagtttcggcatgggagatgtgctacttattgcaggaactggcgtatggtttccaacgcctgagattgcctgttcaattgtatttattgccgttatcggcggaattattttcttcactcttggcggattaaacaagcaaaaaaaatatatcccattcggtccgttcctttgtggcggaatgtttgtttactcactcgtaccgggaatattattctgaggattaagagcaatgaaaaagacagataaaggtgtatctcttcttgaggtattacttgtcatcggcataatggtgatggttatccctaaagtttatgaaaacattgaaaaccatctgaataatgttcgctggcagaatgcagcagaacacgcaaatacctataacaccgctgttcgtaattatgttgctgacaatgcatcaacactacttgctggctctttacccaaaacaatcacgccagcaacactcattcagaaaggctatctgaaatctggtttttctgaatccaattttggacaaagctacattaccggtattgcaaagaacagcaaaacatcccgtctggaagccctgacctgtagtaatggcggtcagtccctgtcagaagccggaatgcgctcggtagcaagcatgattgaagggcttggcggctacatcaacagcagcaagcaggcgattggcgcgggtggcggctggtctgacacgccttcaaattacgggctgaactgcgcgaccgggcatattgcaatggcacttgttggcgctgatttgcaggaaagcgaccgtttgtatcgttactccataaccaatcgtcccgaccttaacaggatgcatacggcgattgatatgaacagcaacaatctgaacaacgtcggcactttaaacggcaacgccgccgcgctctccggcgatatcagcgcacgtaacggtacgttctctggcgcaatttcaggaaatacagccacaaccaacggcgatatcacttcgaataatggctggctggtcacaaaaaacagcaaaggctggatgaacagtacctatggtggcggctggtatatgtccgattcgtcctggttgcgcagcgtgaataataaagggatttatactggcggccaggtaaaaggtggaactgtacgcgctgatggacgcctctatacaggcgagtatttacagcttgaaaaaacagcaacggctggcgcttcctgctcccctaacgggcttgtaggccgcgacagtacaggggcgatactttcgtgccaatccggtcggtggtctggtggcaataaagtgaactactccgcctgtaagtggtatcaatcatctgtagcaatgaatcacttcattggcgggaaaagtggaggatctatctactacaaacccattcaatgcccgaccggatttatcatgacaggtacacgcatgtatggcattggtgatggcgttgatgaggaacacgttgatgcttattgttgccccttcggttaaatcccagcaccaggaagattcaggcatgtaacagtaattgtgccgccggactcataatttccccacgcataattattcacataccaaaccttgttttggtcggagtatacctgctgaaacccaccaaaaggcgcaccattaaggtatgtccacgaacagtacgcatgtacgccaatgctcagatttcgggtgtttttcccgatattgtacgtactggtagtgaagttcacttttgccgttgtccagataccggattggcactggcccccgtgccaatccggtacgtggagaagggcatcaggtagcactgttctgacaggaaaaatagcaaatggacaacagatcccattgccatctggtttttctgccagccagtgtacctggagtgtcagtaatgcagaaaatccgcacgggtggaagccgaattattttgcggggtcagttgcaacctatgatgccaatcgaattgtgaaatgcggcttctatgacgaatacaacttttatggcggtactcaccgaactgacctgtcggggaaatgtagttacatcgtggtttgccagtgataagtatcgtcactggcaaatggcgtaaactgtaattgaaccattttgatcttcggtcgtgtcgcaactggcagtccatgcattgttgcctgaaggcatggaacgcgtgagccatataaatccggtatttgatctgcattgaccgcctccaccaatgactttcttgccagatggacatgttgccgttgctccaggccaacgccacgcagtagctgaagcggtaacaatttggctatcacctgcgccaatttttttccacgtaccggattggcacggaggccagtgccaatccggtgtgtggagggcattaggtggaaagctcaaggttactcaactttccagcactggttacttggggcaatttgacttttgtgccattgccagaatgggaaatgctgaggattctcattactgccaggtagtcgagagtccatctggttcacgaaaatggtacaaatacgagcacaagacaggttgtattgcgtcctgtgtaactctcaattaagtttggtatccaaaaactgaaaatacccctgagccacaagagtagttttgggccggataagaggtgatctgataagttgcgccagcagggacagcaaaagagatgaatgctgtcttcccataagatgggttgttgctcgcatttgtgctaatcaatacccctgcaacgtatccctgcaatctggatgtgttagcgcaatctcccccggcggaaccaccattccctccagaggcgtaaacaaacagcgtaccacttcctgtattgcgaccagtaaatgatcctctgtgtgagccaagattactgtaactaccgttagaggaaccggaagttctccacacaccggattggcacggtgatattgcatttcgaagcaagaatctctaccttccccccttttttgtctggaggggatatgtttcagaaaatcaaaattcgcaaaatgacaatcagccgggcgctggacaaatacctgaagacagtatccatccacaaaaaaggccatctacaggagttttatcgcgtaaatgtgattaaacgtcaccctattgctgaacgctatatggatgacattaccactgttgatattgccaattatcgggatcaacggttggcgcaaattaacccacgaacggggcgtcaaataaccggaaacaccgtccgtcttgaacttgccctgttgtcatcattattcaatatcgcccgtgtggaatggggaacatgccgcatgaatcctgtcgaactggtcagaaaacccaaaatcagtagcgggcgcgatcgtcgcctgacttcaggagaagaacgccgactttcgcggtatttcaaagaaaaaaatcaggctctttacgtcatttttcatctggcgctggaaacagcaatgcgacaaggtgaaatcttgtcattgcgttgggaacacgtcgatctgcaacatggggtagctcatcttccaacaaccaaaaacggtgctccacgcgatgttccgctatccaggaaagcccgtaattacctgcaaatgctgccgacacagcttaacggtaatattttttcttatacctcttcgggattcaaaagtgcctggcgaacagcacttcaggaactgaagatagaaaacttgcattttcatgacctccgtcatgaggctatcagccgatttttcgaacttggtacattgaacgtcattgaggttgccgctatttcaggccatcgctccctgaacatgttgaaacgatacacacaccttcgggcttatcaacttgtcagtaaactcgatgcccgacgcaagcaaaccagcaaaatcgctccctattttgttccctacccggcaacggtcgagaacagaaacgggcaagtcgttgtgactctgagtgatttcgacctggaaacaagcgcagccacaaaagaacaggccatatttcatgccagcgtgttgctgctacgaacactggcacaagccgcccagcgaggagaacgcgtccctactcctggcgaacttcctacaaacattgatgaacgggtaatgatttgtccattaacaaattagaggattcacttatgatagaacaactacagagtgattttttattctggatatttatttacttcctgatagtaggtttgcttatcagaaacattcatcttaccagaaaaattaaatccatcgaaaaaaacaaaatgttcccagcggaggaatatgctgtcctggacattgaacagcatatgtccaataaatatattgggcggctagtaacccgttttatgaagagaactaatggtgcacctttgttaattgtgtttccagaatacgataaaggagacaacaatgaagacaaaaattctccaccattccaacttgtaaaactaacatccaacatcaacaatattaaagaaatttattccaatgatgacttaaactgttttctgaataatatttcggcacaaaaaaatttatatacaacgcactctggacctagccaggcatggattgaacatgcatatcctttgcaacaagtaactattctcttacaaggcactcgtcatagtgaaagggaagatataatcagtcaacttgagattattctttccagactaaaaaatggagaaaatacaggttttgagcatgacgatgattttggatattcatttcagtatgatgccgcagcagtaggaaaatcatcatttttcgatgaagcggcaggaagaaaataagaataacgctctatccattgcacagacaaattaacgttaatcttttatgaaaatcttattaacaatatttatttatctgcttaccgcttttcagtctgcaaatgcaggtggaataccttatacatttaaccagaaaattcttcaggggaaagttattcgcgttctcgatggcgacaccatagaaattaaaacactacccgcaaaaattgttgtgtatgaagttccgatccgagtccgattgataaacatcgatgcccctgaaaagaaacaaccttttggacgctggtcaactagtcagcttaaaactctggttgcaggtaaacaggtgacagtctcttattcacataaagaccgctacggacgcattatcggtcatgtgttcacgacgaacggcacggatgccagccgctttatggttcagtctggcgctgcatgggtatatgaacgttacaacgtggatgagtcattaccggctctgcaacgggaagcgcaggaacaaaaacgtggtttgtgggccgatgcaaatccggttccaccgtgggaatggcgtatcagaaattaagggggcaagaaaatgcattcttcttttggtttgccatgattctgtctttttatctttgtgcaatattaaaggcttctttttaacagggggcggcatgtatgtaattaatcaacagacaagggacaataatattcttacgttgcatgatgtttttaaaatctatcaaaatacaggggggcttcgtcttgtaaaaacagaggagaatgaaaagtacatctccattatcatttgtggcgtttttcgtattagaaaaaacaaaaagaataacaaaatcactttgtggggatacaagctaagagataagcacactggggtatggaccagaagaaattcatttcctggtaagatttttttattctggtctaaaaaatctgcatacgacatggacgactggttaaaatatgcgattagctacatcatcaaatcattgattgaggctggatattcaattgaagacaaactctatttgttacgcattggagaggaagaggaaaacagcgagagtcgttatatttccacactatatccatccaatgtatattactcatatgagtatggaatacatgacattgttcattgccttggtaaaatagcatcattcaactacccctataatacacgatatatcagcagacatattttactcgcagagataaaaaacaaaatttatcagagagcattaaaaattataggggtggataatgaatttaatgcttcaaaagcattgagtaaagctatatggataatggtagataaaaagatatttgcacaatatgccagagcttcacattgttcgatagcttacaattcaattcgtcaggcattatttgaggactatctggatttttcaaagcgaatccatattgtgaatgatatggattttttcggattgtggcctatggttggtcgtctaagacaacaacataaaaatggtcagtttatactatctggaaagacaaaagagttatatgaaaaaatcagttttccctgcaaacttagttatggtgagttcagaagtttacgacatgttagtttgtcattagtatatgctttaaatgataaacatgataatgcatcattcagatttacagtcagattattacgccatccacttatcaagaactatcctgtgagagcaatttactggattatcgattatattagcattcgagcttactcagaaaaagaaaatgatatttatcgtatatgctcaaaatggctagaatatcatcgtgatttatttaaaaacattggcttttatgaccgtaatactgaatccaggcaaacatcacgctgggaaatggaaacgaatcagttgtgtcatgcaattgactggttgttagcagaagaacggttaattcataaaaaccaggagtggccttctttctggagactatctgatgaatggacgcgacaagtgaagaataacgttattcccgtaatcccaaaatggaaaggaactgggataaactggcagaaagttgataacggtgtaaatgaattaattacatttgatgctctgtgtcaggaaggtcaggagatggaacattgcgttgccagttatgcagactggtgtgcatctggagaatatattgcaatttcagtcctgatggataatgaaagagccactcttggactttcacgaaaagaacatgatttaacctatcagtttgaccagatgagaggtattcgtaatcaggctgtttccagaaacatgctaattaaaggcaggcatattttaaaaataatcaactcatcactaaaaagataatgagtcatcgcatctcattacagcaccgatgactgggtgtttattctttctgaatacaaaaactgactgaaagataaggaaagaaagttttcttacctgtttgtcttacgcaatggtgaactggttcaccatgaggtcaacaaatcagagcttctttgagaggtttaacatgcaatatgcattgcttgatggatttgaacgaaagtttttgctggatgctcttgaattcggtgttctgaaggactggaaagaaaatccggtaaaagaacttcctgatattgatgaatctgctcaccccttccatgtctgttatggtggatatttattaaatcctggtgtttcagattcagatattagcagaaaaataaaagaccagacaggattctggctggcagctattgatgatacccgcatggattgtcattcaatagcttattatgatattcacacactccctctgatttcgtgtggtcatcaaaagatagttccttttgccgcgttaataaaagctgatgaatgcatcatttcaaaaatttcttcgtattctggttttgccgtaacagcctttttgagaattaaagaccaggatattgcaactaatatacttaaccgtgaggggatttttgcttttaatggctgtgaacgcagattcagacatccagtaagtgaagataactggcaacaggcagtatcagaagaacgtgctatccgttgtgccaaaagattaattcaatgtaaaggataacaaaatgaaactttttatcgcagaaaaacccgcagtagcgaatgatattgttaaggcgcttggtggcaattttacccgtcatgatggctggtttgaaagtgataatactattgtgactaactgttttggtcatattatcgaatcacagccccccgaaaactataatcctgaatacaaagagtggaagattgaaacactccctttgcgtctttatcccgtaaaataccagcctgtagaaagcgccgaaaaacaggttaaaacgattattgagcttatcaggcgtgctgatgtgaccgaaattattcatgctggcgatcctgatgacgaaggacagctacttgtcgatgaggtcctggaatatgcaggcaacacaaaacccgttaagcgcgttctgatcaacgacaacacccttccggctgtgaaaaaggcgctggcaaatcccaaaaataaccgtgacttcagaggactctatctcaaggctctggcgcgttctgtagccgacgcgatatacggtttatccatgacgcgtgcttacacaatcccggcaaaaactaaaggctataaaggtgttttgtctgtcggacgggtccagacacccgtgcttggcctgattgtaaatcgcacccgtgccaataaaaatcataaatccagcttctactacaccatgaccggacattttcaacgcggcgctgatgttatcagggcgaactggaaacctggtgagttcgcaccgctgacagaccgcaaattgcttgataaaacctgggcgaatggaacagcaacatcacttgcaggaaaaccagccacagttgaagcggcagcaacagatgataaaaaaacggctgcaccgttgccctttaacctggtacgacttcagcagtacatgaacaaaaaattcaaaatgactgctcaaaaaacgctggatatcacacagcagctacgcgaaaaatacaaagcaattacttacaaccgttcagattgttcatatctttcagacgaacaattcagtgaagcaccacaaataatcgatgccctgaagtcggtgtttgatcagccaatggatattgatacgacacgtaaaagcaaggcatttaacagcgcaaaagtaacagcgcatacagccatcatcccaaccgttagcgtaccggacgtaaacgcactgagcaccgacgaacgcaacgtttacctggcaattgcacaacactatcttgtccagttcatgcctgaaaaggcatatcaggaagtatccgtcgccattcagtgtggtgatgagtcgttttatgcccgtgccaggaaaactacagacagcggatttgaagcgtttcttggtgtggaaaatgccggggacgatgaagcagaagtcgaaaatgatgattccgcttttgatcttctctgtaaaattcgcacaggagaaacagtgacgacaaaagaagtggttgtgaatgagaagaaaacaacgccaccgccattattcaccgaagccactttacttgccgcgcttgttcgtgtcgcagattttgtcactgatccagtgattaaaaagttactgaaggataaagatcgggataaaaaagacgaacatggcggtattggtacgccagctacgcgggcttccatattggaaacactgaaaaaacggaactatatcaccctggaaaaaggaaaacttattccgacagataccgggtatgcgcttattgatgctctgccggatatagctgttaatccagatatgacggcattatgggcggaaaaacagacactcattgaaaacggagaaatgaccatcgaacagttcgttgacgaactgtacaatgatctgataccgatgatcagtaatgcgaacagtgctgaaataaaagtttcccccagcgcgccgtctggtcagtcacaacgcctgtcctctccttgtccttcctgtggtaaacagattgttatcaggccaaaaagctattcctgtacaggatgtgaatttaagatatggaaagatttctgcggcaaatcattaaccgataaacaaattgaaacgttaataacaaaaggagttacaagtgaattgaaaggtttcattagtcaaaaaacaaacaaagaattttcagcaaaagtaaaactggttgacaaagcaaccgggaaactgggatttgagtttacacaaaaaagtaagaaataaatccagcagtagaaatcaaacatcgttgtagctactataggacaaggatgttcttcaggaattgtacaatgaaaacaaaacaagactggctctttcagttaagacgttgctcaacactcgacacacttgaaaagattattgaaaaaaaccaaaacagcctccccccttctgagcttgagtcgtttaatgccgccgccgatcacaggcttgcggaactcacaatgaataaactctacgataaagtccctccatccgtctggaaatatgtatattagttttcatctattaatattagatgtttgatcgacacaaacatcagcaatccctatacacctttcatagaatgaattgaaccctgtatatagcctgtctgaaatggatatctggcaggctatcttaatagtgttataggtggtatgaatgtttttcctctacgagacctacaatttcttctactacctgataaagttaattgtcattcagccacaatatatttgtgtctatatgatattcttttttttcaatgcagggatagcatatagcatcaccaatgatatcgaggatcaagtatgtcgatggcttttattcgtaagtatgttacatgctctgatgattccccccgcagttatcatgccacttatcatgccaccacaggaaatacttcaggaaacagagaaaaggcaggaactacatgaatcaatacccaaaacatgcaaattaaaggcactggatgctcaacaaggtggtttattcggcgttgataaagatgaatgggtattccctgacaataaatcattctatctgcctgaaaagtaccgtccagaaaacaggattacggaactagccatgatgaaagaaggataaagacctatgaagatattcaaattgtttgttctttgtatcccccttctgtttagtctttttttcgctggctacggcattttgtcaaaaaatccatttgaaacactaccgtgtctgtccgccagtgctttttgcctttttctgtttgacatactgaggcgatcatttatgaagtgaggtgtcttgatgttaacgttgaggttgagaaagttttgttggttcttataattatagaccggattaaatcatgaaagaatacgaaaaaacggctttaatatattccttaaaggaaagcaatacattagttcttcggattatactaatctctattttagttgtcggggtgatttcaggcgcgatatacttatataacttggcgatctcgttgtttgattcaaacccaacgtctgtgcaattcaccttttgcggagtaggctgttttattgctctattacttcaatggatatctaatgttgatgcaaattacagagaaagaattggggagcaaccaagtacaataaaaaacattgtacaatatttatttgcagccattattaccattagtttcattacaatggcattaacagccatattagtcttaaaagactcgtccaacatatggctcaacattacttttattgcattattactgtccatttttgtagctattatttctgtttggggttgactttttttcttaaaaagcccgaaaaccgggcttttttcttaattagtgcatgtcctgtgaatcgtcacgctgctgctgcgattcctgatgatcttctctggcctggacaaattgttttccaagagcatcttctgccatttcacgagtgaatccgtgattaagcaaatcggattcggccttctccctttcgaacttcagtccttcccctctgaacttgtcctcaaagcgatcaattgcctcaagaatcttgccgtcttccggcgtgcaatcccgtccctgtgctttctcaatttcatgacgctccacgcgttcagcatttttcattacagcgtcaatcccctgagaaatatgttcagactcgacgcgataaatgacagtatcgcgcttattgagatcatgtagctcgcattcaacccggccccactcaatagcatccttgagagagctgaaatcttttatttcagcattcagaccttcatgtgttgagaaatagacataatccttctgttgttccagtttattcacattttcaatagcccttgtactgaaatggatacctgtaattaccggaacacgagccgatgtttggtcccccgttaaaacttcagaaggtgtttttccagtgatcgcggcaaattgctgctccgtaacatccactctggcaactgcatcaccacgctctaagccatgcttaccagcgaccgcaaggcgataaagaccaccttcccccctggtaatttccgcctccacaacgatatccccattgcaggaactgaactgagaacggtctttaaccaggaagttttcaagcccggagatcatatgctcgttagctgaaatactggcgagtatctcttctggtgattctctggacgaatcccccgcctgttccatcactgccatattagcgtcattaacagcgtccttaattcctttaaaggcgatttcttctcttgttacaggtgtgattaagatatcatcctggttaagcccgtgctcctgaagcatcttatttttatattcagatgcgtcgtgcaatgactcaaaagtcttaatatcttcactaaactcatccttcgaaaaagaaaccgcatacactggagtacggtattcttcatatgaattggcaattatttcaaatggcctatcaaacgttactaatgccccctctggataagaggataattcatcggttgagacagttttagacataagcacaacagtatcaaaaccatcaccatttaaataattgctttcatatttttctattgcagaagatttgctttcctcataacactgaatagccgcatctttagaatgaaagacgataccttcattcaaatcatggaagcgactaaagtttatacaataaatttcctgtttattatgcacctgcgcagtagcctgatcgtgttgagtagtaagctgctcctgaatcagagcctgtgttctgtcaatacctaactcattcacaattttgcaaaattcttttgcgtcgttttcattatcaaaactggcaacgtcaaaaatatcatcgctgtctccaggtacatgtcccagcacttcccaaatctcattttcatcgctatccagagatttcaaatagccaaattcaccatttgtgcctttactaagcatctgtgaatccagggtgtttgccctggtaataacaccaggatcatatgaagatgtggcctgctctgcgacctgtgcttgctccgcgacctgtgctttctccgcgacctgtgcttgctccgcgacttgtgcttgctcggtggcctgtgcttgctctgtggtctgtgcctgttcggtggcctgttccttcaatgcatcacctttctctattctggattcggactcctggctattttcctgtgtttccacctgctcaaacttattaccctgaagttctgcttttaattccagcatcatctgttgatactgctccgggcgtaaaataatcttcatgtcctgctctgcggcaacttcagcgcacatttttttgaaatcttcagagccggtaagtttgagtacaccaccaaacttttccctggaatactcaagcattattccgatctcttcttttgagggatttttacccgcaacgacaaagttccctttgtcggtaaagacaggcttttccgattcctgatcgcgataaacaatcctggaatcctgcttatccatcacaagatcttttagtttggtgttaacctttttcgcctcttctaagcggcgctgggaatccaccgctttctgaagcgaaagttcgggttcgtcagcagaaatggcgttgatttcatcgaagttgagatagcttttgagacgttcaagggctttcatttcatctttatccttatgccagtcagcatgatattgacgaataatgtgtcgcccatctgtgtcgagttcagaaagacgctcaagtgtggttagttttttgtaaacaatcacacccacggcaatatcacgctgttcacgtggtattaacttcaactcgcgtctcatctctcgcagatcattatacagcttgccacgctcaaacctgatagtatttcgtaatgttttttcagataaattcagtgagttaagacgctcacgagcttcatgatgcgtaaggcgtctgtaggttggatagcgcgtatatggcgtgttttctaactgctgtgaataaacttcaagcagaaaggatttcgcatctttccaggcaagattaatatgctttgtcagaaaatcagatgcgttcatattacgattccccacagaaaaccggggggaaccgtcctttgctgttctgattttatgctgcgctggaataatattaaaacgctcggcggcagaagacagaaacctgacaggatcaatatttctgcgaatttctgccatcgttgtaatttcgtttttctctgccgcctcattcagagtctgaaacatcgtttcacacaaaaaagaagagcgttcaagactttttattcctgactctgtgaattgtctatcataatcccgtcgcacatcctgaccaggatgttctctttgcggtaattgctctgccagatcacgctgcgaaatatctgacaatacactgatagagtcgggtcttgtgaatccattgattccgtaaaccataccgcgttggggcatacgtgacaatccgactgttgcttcagattgacggattctggcaaactttttaggacacgacttgtaacctcccgctcgtcctgacgtttgctgagaatttctttcgttaagtttttctcttgagtcatattcttttatcctctctttcagaaattcaatctgctctgcttcagataaacttgtatagtccttacgaacgctggcgttgagaaaaacatgtttaatctcgtgactggttttgtttacccaggtattgagacgtttttctatttgcttaggcgtaggtttttgaagagtcaactttccctcttcaatatagtttttacgaaacaacgggcttttcagattagtgaactttttatctcccggtaacttaacagcaatatattcactggcctttccttcatttcttatcctaacctcaccatattctgcaacaatctgtttgaatacagcataatcacttactttttctttttcaattcgataattcaattcattcttaaatgcagaattacgctctacatcaagatctgcttttactctctttaaaataacactataatcactattttttctcggaaagtccttcgggctggcaagattatatttattgttaatatgctcctgtattgcatctagctgttcgatagtatgacctttccctataaggccaacaggatcaagtttatctcctgtaactagattaacctttggaatgacaatatgaatatgaggctttctttcaattaactctcctgtactattatcctgaatatgccggatttttggcaaatgtgcttcagcatagaaagaatattcttcaggatgataagcattcatcaataattttttataatcatccacaaccgcctttaacatttcatttgatacgtgactttcatgaaaagacaacgtaatgtgcaaataacggtcctgtttgttgtcttcaatagaattgataatcttatctgtagtctggagatcaccatcaagaacaacacgatgatcaagttcatcacgtgtgtactgacgttctgctttgcgaccatttatcaggtaatcaacaataccgtcattaccaccaccatatctgacaatcatttggctatctcctgaaggcgatcacgaataccaatcagcacatttaaaatctttttataaagcgcctctgatataataccctttaaatgatctgagtttaagcggtgagctatctggttaatattattcccagcccaacttaactgagaaagacaccgtttgtattccgggatatggcgtttatctgatgtgtagttttttattttaccaatagtaagcagcctgaaaaattcagacttactaatttcaagctctctgattgctctgtcaaatggagcatactcttcttctgtaagtctgaatgtcacatgaacacttttgttggcttttttcttcataagtcctcaaggttcgtagaaccgcactagaacggctgcgccgttcggggttgcaaaggggcgtcccctttggcacaagcattgtaacatgcccggaacgggcttgtgtacaaagcttatcgtgcctgtgttttagaaggacaaaaaaatgccgtgcatacagcccacacaatgactcacataatcacccacaactcaaaacacacagcccacacaatcacccacactttaacccacaaaaaagaccacaaccccattgacaacccacaaaacaacccacataatcacccacacaaacggcgagcaaattgctttaaataaggtattatgccaatgtaggaggtagagagagagaggaaatgtaacaaatgaaaaagatcgagagtttattatctccaatatgcgaggctataaacgaaacaaaatcgaaatcaaaacaggctgtcttcaatatgtatttgcaaaatatacttgaagcaaagaaatattatacatgggagcaaatagctgattacataaacaacaacaccaagacagaactagcccaaaagacttatataaatatgacagagagggctaaaaaaagacaaaaatgcactgaaccaaaagaacaggcaaaaaccatagatgtaattgttcagaatgaagctaaaggcgatgaaccgagagggggggtaaaaggttttttttcaaacattagtgagaacaaaaaagaaatagagcacgatccaagtgctacgaatgaaaaatttataaataaatatctttaagtaaaggagcattataaatgaaaaactcaatcaatttcatccttcagggtaaaggtggtgttggaaaatcattcgcgaccgcaatactggcacaatactttattgatgaaaatcacatggataatatcgtagtcggtgacacagacccggttaatacaactacggttaaagtaaaaagattaaatgcagatttgatacaaatcactgaaaacagcaaagtaatacaatccaaattcgatccaatgttcgaatcgatgctgaccaatagtcagaatacttttgttattgacaatggcgcatctacatttttaccgttaattcagtatttcaatgataactgtgttatggacatgtttgaagatgtagaacaagacgtttatatccatactgttatcgttggtggacaagctcttgcggataccttgcagggatttgaagaactgaaagaactggttaaaggaagtaaggtaaaacttattgtctggataaatgaatttcagggtattccagcacttgaaaatatcccattaatagaaactaaattcattgaaaaaaacaaggatgtaatcgctggcgttgtggttattcaggacagaaaaagtgatgcctttgcctctgacatcaaagagctaacagaaaaatcactaacactgaaagaagctcttgagtccgaccattttggattaatggctaaatcacgattaaaacgagtcttcaatgacatttacaaacaattagatagcatctatgacgatgaatacggtgaataatatgagtacagttaatcagccagaattaaaacagcctgaaaaggctgtttccagtgaagatattgataattttattgttgatgtattcaaggagacagggcataaaatatcaaaagatgatccagttatttcattaatttttctgaaccaaaagatacaggaaaaattcagcaatgagttacaagctaacttcacagccctgtctgagggcttcagacaggtcgtttcatctgtagaaaatgactatattcaaagattcaagaatattgttgagacgtgcggcgatctggataatgaaataaaagaaaaagtagaagagggaaaaaacgatctaaaagaaacaagtgttgaggtaaaagaaaaattaacagatgatattattgaactcatatctggaattaaacgcaaccaggaaaaaaacaacaaattatatgaagaaaagttgaagtcattatctaaggctgtaaaacccttcagtacaagaacagccattgcaatttgtgccttgtgcacattatgcctgtctgcggcattttctggcgcaacctggtatgttgcacaacatgaaaaagaggcaagcctgcgcttctatgcaagagcttttcttgatatgaaaaaaataactgaagagagcatgagaaaattaccaaaatcagaccagcaaaatataaaactcaaactagacgaaattgattcaagaaaaccatagatatgaaaaggagtcactaatgacaacttttaccgacgacgacaagaaactaattaaagaaatcagggagcgaatcggcagcctggacgtgcgagacaatattgagcgtcgggcttatgaaatttctctggcatcgctggaagcagagccagttatgttctgtatatcaggacaaaatgtagattcagaagaacatgtatcaaccagcaaagcggttgttgatgcctgggttgaagaatggaatcaggttgacggaagtcctggcgaaccactgtacaaaactatgccactctactgtcacgctgccttgccagcgccggtagtgcctgaaggactggttaaagcggtgcgtttttatgagcaggtaaaaaatgagaatccgccagttgggactggtgcgtggaaagacgctgttgactgggtgctcgaagaggcttgccaggctgtaaatacagacatcaaaggatgaacgatatggcaaccaacaatcgtaaagccaagatgctaatttcccgtgtatacagactttgctaccccagccagtggttgagagttagcaatcgccgtgtggtgttgttctcattttctggaattgccagagagggaatcaaagataagcgcagcgcggcgcaaaaccgctggaaaaacaacttgcgcactaaaggagcctaatatggctattgccgcaagttacaccatgcatctctactgtgattgtcgccagtgtacaaatggtaaatatcagtcgccagacttcggtgagtatatcggtacgtcatgggctggctgtgcaaaagaagcacgtaaagatggatggcgaataagcgccgacaaaacacgtgcttttgcgcccggacataaagttttgaggattaacaaatgacaacatttaccgacgacgacaagaaactaattaaagaaatcagggagcgaatcggcagcctggacgtgcgagacaatattgagcgccgggcttatgaaattgctctggcatcactggaagcagaagcgccaaatttgcctggtggtttcacaattgaagaagcaaaagaattacacgaaaatctggtaaaaagtcacgtaagcaaggctttaagtggcgaaaaaatgaaaaaagaaaatcgtgatgccgatttgcgctggattcatggcgtaatagttcaggccgcgtggtttgtgaaagcatcactagggcagaatgcatagtgcgtacctgcttttctcctggcaacggtggatcttccgcttcctcgtcactcgctcgctatgctcggtcgctggactgcggcgagcggttagctatcaaaaaaaatccccgcacaacgcggggatagttttatttatatgcaagttcatgacgtgccgcctgagccagaaaatggctacgatctttgtatacgccgccactttctctcacatatccatcaatacgacgaatcaatacatcaggcaatgaaatattaatacgttgttgtttgccctcaatttctgacaaatcaacatcaattacaaaccagctatcacagtggttataatttgggttggcggaataagtcaaacacccttcatcatgaatatcatcaacagaatgagcaccgcttattaccatctcttccacgattgctaatatcgcttcacgcgccattgcgggtatttctgcctgagaatcagcagcagaaacacatccaaaatcaaagcaatcaaaaaccggaacggtgataccgtatgctgtatgatcatctttcggtgtttcgacaccaacagaaaagaacatggctacctccaaagtcggcggggattaaatccccgccatttttttgatcgatctgacagtacctagcggcaagtcctttttaggatgaggaacaggaaaagtttttcctgttattggcgaccaccatatctggtgactgcttgccttatgccgtttcaactcgcaaccagcagctatcagttctttcaacaggtcagcagatttcatatgtcctccctaacctgaaaacaattatacacacgcatacacacaaaagcaaattatttcattcgtatgacttatgaaacacactgtaaagacagttcaatctttacagtgtaaatcatttatccagttttatcgctatgcatgtgatacatagaaaatcatatagtgttttactatatgatacctgattgacacttttaactgcacatctcatcatttacatcgtaaagacaaacatagctttacaatgtaaagctatataattaaacactccgtgtccctgataaggaaaaaaaatggctcaaccaaccccagaaaagatactggcaatcatagatgatcatgatcgcgcacaaaaaaaacaacgcaacaaaaacgtcttcatttatttatgtctctgcttggcaattattggagtggtcgcgcattcctttatatcaacgtttcgtcttgatggtgtagccgtccttacaattcttttgggcgtgtcagcaatcgcattttttctacattatgtagaatcagggaaaggccagattcttagcagtgaccgcatattgtccatactcgctcaaaccaaagattaccccacaattcgacgtaaagttgttaatcgcttgctctccggttcaaaactcacgggtaaagatgaagagtacatattcagtgaactgaaaaaggctgaacaaagcaacgaacgtgaaaagagattgcaagcaattaaagagtatacatcgtaatacaacgtaaagcatcacttgtaaatacaacacactacatcgtaataccagaaaacaccaacgccagcgagcaacaaaaaggggcgattaagcccctgcgcgatgattaatgacttctttttccagtgcctagctctggatcaagcctgacgttaaacacacctttaaagggcgcgtcaggctcctttccgtcctccacacaggactgtaaatacaaatcaaccgatgttttaaattcccgttccaggtcagctaatgtttctgcctcaaaagtcaccagatctcgaataaatgccagctttccatgcaggatattattttcaaaatccggctcaactgtacctaaatatcctttatattttaaatgtttcataaaaccccagcctctttcaagaaaagttatcagatagaagggtgaaagaaaataccagggagcagcgaggccacatacccctaagcgcagcgcaaccgccggaaaacgcaccacactgtaaagacaataaaatctttacaacgtaaagctaactatgtaatacaacgcgctacacattgacatcctccacgccctaaaggacgtggattcctacgacgttcaggctgtcgcctgaatcatttcggtgggttcctgcttcaacgagcggcctgactgcaccatctctccacaggcaagaacggcgtgccccgccgctaaaatgttacgagcgccatttacatcggcgttcgctgtatatccacatacctggcatctgaattgactttgtgacaggcgattttctttcgctgtatgaccacagcacgtgcaacgctggcttgtgtacgctggcggaacagcaagcacctgaccgccacgccagagctgcttgtactcaagctggcggcgcatttcataccagccctgatccagtatcgaacggtttaaacctgattttgcccggacattgcgccccggctggctgaccgtacccgctgctgactttgacatgttgctgaccttcaaatcctcaatgactatcattgcgtggtttttgctgacggtcgttgtgactttgtgaaggtagtccctgcggatatttgcgatacgggaatacagtcgctgtattttgcgtttctgcttctgccagttgttgctgaatttgaccttgcggcttaactgtcgctgaagtctcgccagcgtcttctggtttttctgaaaactgtttacaggatcaaaaatagtgccatctgacagcgtggcgagtttagccacgccagcatccagcccgaccattgatactgaagggtgaaccggagttgatacttcactttctgtctgaatactgatgtaccacttaccgcaggactgactgacagtgacatttttcacaacgcccgtgacctgacggctgttccggtagcgcatccagccaagtttcggcagaaaaatacgactgttttcctgatcgagcttaacgccctgcgggtagcggaatgcatcattctgtccccgctttttgaatcggggaaaagccgcccgcttctggaagaaatttttgtaggcccgctcaaggtctttcagtgactgctgcaatggctgtgatggggcatctttaagccattgggtttcagtggcatttttccactcaaccaaccacgaggccatccttgggtaaggaatatatttgttccctgcctcatggttctcattctgaagcgccagagcacgattgaaaacgaaacgacatgcgcctgcgaagcgcctcatttctcgctcctgttgaccaccgggtcttaactggaatttaaatgcctgtagtcgtttcattcgaccattttaaacaaaaaaagccaggtggaaaacctcgccttatatcctcgccctgaaggacggggttttacggcgcactggataagaaagggagagcattacactctccctatatatgactcaaactaaagcattatcccggttatgcgcccaccaaatgatttcgctaataatccatgcttctatcgcgggtgtttttacaggttccccatttacaatgcggtttgcaagctctatcatttcacatactgacatttgagaatctccaaagatgcatctgtcatttggtaacaggctgccccacagcctgttaccaaccccaaattagtatttgctgattactttaccctccttaatcatttttattagttcctgttcagaatattcttttccgtgttccaatgtggaatatatatcgccaatagtccatactccacactttttaatttctgcatttagccaggattcatgcagaataaacaacggttcgcaatcatttcctttttcataaacataaatagattcggtatcatttccagaatcagaagtaccaacgactttttctatatcgaaatgtttttttagaaaagttgtgaaatgcattttcatgctcctgccgctgagcggctttggtggttggggaccatcccctcccgatgtgtttataataggtcagaactgacctattatcaagtatttttccctccattcttcaaaaaaaacaccatcaaatacatatagttatattcatgtgatgcccgacagggcatggaaggggcgaaagaaaataccagggagcagcggggccacatcgccccgaagcgcggcgcagccgctgacgaacataccaggatgcacagggccatcccttcgccctgcaaagccagaacagaccaacaggccatgatcatgctgatttgcgccgcagaatgccgcagttagcgcgagcgacagcgagtttacgccgtcctggtgcattacagcagggcggggcgctgtactgcgcgtgtgagcgtcagcgagctacgggcgcaattgctcattgttcaatgcaactggggctattaagtccagccataaattcagttatggtttttgtagcttattccgtgatttcgtcatacgttaattctattttcatcttaatattccttaattacttccagaatcagaattctttttattccttttacaaagtacataatcagggtgttctccagctaaaagcagaagaaatttaaactctactggtgtaagtgctgtaccgcttgcagttccgacaggttcttctttgcgacgccaggtacgcggactcatgctaaatatttcggcacattctttctgtgtcaggccaattttttgccgcagacgtttaatgttttctggtgtgttttcatttggcattttttccctcactcatttcctgaatcatcatagaaacaatttctttatcattctctcttaatccgtcgctggcaaagtcgatagtgtcgaatgccttctcatgaaaaacaagatcggcaacagttttcaccgttgctttcgtttttcctaaagtcgcagacttagaaaaagtttttactcgcttcaccagatgaaacgtatcaccttctttattcagataatattgtctgtcaccttttcttatcttcatattgagatagtctccccttttaacagtaaaggggcatatagcccctttcttttaactttttccggtaatcaaatcgacatcttcctgataaagctccccaagaaccggaacaacgccttttttataatcacggatattatggcagtctgtaaaaatgacgacataagcctcgcctgttttttcatgtttaaggcaaattgtgcaaagcgtcacgcgcacaacagaaaacacatgaccagttgtagagacgatagcaggaaaagtagattgtttcatgtttaactcctgccgctgagcggctttggcgattgggggccatcccctctcaatgcattaataataggtcacaaatgacctattatcaagtattttctagacgagctttattgaaaaatcattttcaataaattcatctaacatctttaatataccagctttatttacgaaatcatcctccataatttcgatacttgctgatatttcacatgtaaactcaatgctcctgtcaaatcccgcaatcccagctaatgcagacagcatatgataattatcaatatttatattaccaataagaactttcatttatcctcctgatatggggggaatccccccatattaaaaattacaatctggttgcaagtccggtttgttcattaaataaacattcaagctgatcacaataaatattatcaaattttgatatttcttttactgtagctccacggacacgggaaaatgtcaccaggtatgtatcagagaaggttaatttgattttaaccaaattaattcccttcattgcaaaatttgaaggtaaacgaaagcaaagaccagactcaccattttcatcaaaacaggcaaagttctttgcgcctgtcatagcaataaagcggtttccaccaagctgattaagaatttcagtagcaacaaatttggcgtggttttccatttttaagctcctgccgctgagcggctttggtgattggggaccatcccctctcgatgtgtttataataggtcagaactgacctattatcaagtattttttcctcctttctttaaaataaatatcgttaaatacaaatatttacattcatgcaatgcccggcagggcatagaaggggcgaaagaaaataccagggagcagcggggccacatcgccccgaagcgcggcgcagccgctgacgaacataccaggatgcacagggccatcccttcgccctgcaaagccaggacagaccaacaggccatgataatgctgatttgcgccgcagaatgccgcagttagcgcgagcgccagcgagtttacgccgtcctggtgcattgcagcagggcggggcgctgtactgcgcgtgtgagcgtcagcgagctacgggcgcaacattacattgctgcattcgcctggcattctccacgccttgaaggacggagttttactgcgcaccagataaaaaaaggggcgattaagcccctgtattcactattaacaatttaacatggttgcaggggataccccctgcaactattttcttagtagtatgatgtgaactcgtgtttttcttccggtgatcctttatatgctgtttcgaatgactcaatttcaattgctggcgtactgtaataatcacgcactcgccgttttaatggctcaccacagaaatcattgagtaatggggtcttatatccgctcattgaatgagtccgatgaactgaagcgcgaatctcctggacagttacggtttttttgccatgaacagaaataacctgatagaaattaacgttcgtttgctcatatccccaggaagatacaaacacatcgccaacagaaacagtgccgttattaaaagttaatgttttcatttttatctcctgccgctgagcggctttggtggttggggaccatcccctcccgatgtgtttataataggtcagaactgacctattatcaagtatttttccctccattcttcaaaaaaacaccatcaaatacatatagttacattcatgtgatgcccgacagggcatggaaggggcgaaagaaaataccagggagcagcggggccacatcgccccgaagcgcggcgcagccgctgacgaacataccaggatgcacagggccatcccttcaccctgcaaagcccaacggactgacaggccatgatcatgctgatttgcgccgcagaatgccgcagttagcgcgagcgccagcgagtttacgccgtcctggtgcattgcagcagggcggggcgctgtactgcgcgtgtgagcgtcagcgagctacgggcgcaacaacacaccaggcaaaatcgcatcctgaaaagttaccctgtaacatacacacaatgtaaagcgcaaaaaacaattacattgtaaagacacaaacatctttacaacgtaactataatgaatacaatgtaaagacaaataaacctttacactgtatatccgaggtttctatggggagagcattacttgtcgcatcagataaaggcggtgtaggaaaaagcaccacagcaacaaacctggcttcttatctggtaaataattcacgaacggtcatcattctgaagaccgataaaaacaatgatattcttagctggaacgaaaaaagaaagcagaatggcttattaccggttcctgtttatgaagagtatggcgatgtatcagaagtcattaagcgcctgaaaaaaatatgtgaagtgctgatcattgactgtccagggcatgacagcaaggaatttcgcagtgccttaactgtagctgacattctgcttactctcgttaagccgtcttcagatttcgaagcagaaacgctgactcatgtaacagaaaaagttcgcacagctcaacagatcaatccagacctgcaaccctgggtacttttcacgagaattaacacgacaaaaccacgccacagaaaagcagcgattgatctcgacaagttactccgggagaacccggtgtggatacagccacttcgtacacgtatttcagatttagatatttttgaagcggcctgtaatgaaggcgctggcgttcatgatgtacgtcgcgcatccagcctttctacagctaaagcacaaatagagcttttggcgcaagagttaggcatcaatccctaatggatgtaatacgacagctttacatcattagctttacacagtaaagctaatgtaatacacgaaaggtgatataatggctcttgacttgaaaactccggtaataccaggacaaaaaacagaacaaaccaatgcagacacagcccgattcatcaatgaagctacccgcaaaaaatcgggagcaactaaagtgaccaatgtccggcttggggacgtttacgaagatattctggaacgggaagcactgcgaacaggccagacaaaaacagcaataatgaaagcggctcttgcagcttacgaacacggcctggacgaaaacggaaaaaatcactggattctacagtcagccaggctgaaatgataaagcccttcggggctttatcccttacgttttaattgtttcttctcgctggctttcttacgggcatcgagaaccagttgcgcataagttgcgtgtgctttttttactgtaccagcaggtttcccgtaaaggtcgtaacgtgttgcgcctggtacagtacaattctgaagatattgccaccggaacgtcatcacctgaaccgcacaattccactcttcaatcgtcagatccacatccgggttatccgccaggtatttctcaacgtcctggagaatcccgcttttcaggggcaagttctttttttcgtctgtccatagttcaggaaaaacagcacgaactttattgaaacacttttcaaaatattctttcggatattttgggggaaaagtgatttgttttttcaaataccagggctgaggctgctttttatgtgttttctctgctacagcatctttcttctgtactttcttgttttcattaactgctgatttttgtacttcctgcggcttttcattcaccacaggattttctggcatgaccagaacgcggcgttttttgaccacaatcacgggtgttttttttggctgcatactcgcctcaataattgctgtcatattgactaattataccattttcagcagttaatatcctgaaaatacatggaaaagggggtatccgtacagaataccccctttgcaaaggcgcttaatgccagaaccacatcatccccaaaaaggcgggctttcgcccgcctccgggttgctacttaccgttggattcgtaagccagacttgccgtaacctccctgtttccatctttcagccggacctcgcacaaacgattccgggtcagatacgtgaatattaacaatgtgcagcacacgattaataaacaccaggtcagggcgtttttcggctgtttcatggccttcttctccttgcgtaacgcgcggtaagaggctatcctgatgttgttgaagcattgggatcgcctcgtgggtgtactgaccccaaaaagttggacagttaaacacgaggcatataggtctgattccgatattcaattggagtcagaccttttaatttcaggctaattcttctgctgttgtagtattcaatatattccgtaacagcatccttcagttcgcttatattactgaactcatcaagataaaaacactccgactttaaggttccaaagaaacactccaccacagcattatccagacaattgccttttctggacatgctttgtttaataccatgttctttaaggatattttgatatcttctcatacgatactgccatccctggtcagagtgcagaacaggatgctcgtgaggattaagctttttgaatgcctgatcgagcatattctcaaccatgttcatcactggtctttccgaaaggctgtaagaaataacttcgttgttgaagagatctattactggagacaaatacagcttgcgcccattgactgcaaattcagtaacatcggtaacccacttctcgtttggccgcgtagccttgaaatctctttggagaacattaggggcggtttgccctacctctcctctgtaagagcggtatcgcttgaccttaatcgctgctttaagtgagagggttcccatcaggcgctgaacagctttatggttaatctgtttcccttctcgatgaagagacagcgttaccctacggtatccgtatcggcctctattctcgtgataaatctcactaatacgctttttaacgtccgcatacttgtcaggcttgctgagagcctttagatgataataaaacgtactgcgcggtatctccgcagccctgagaagctcatcaagaggataaaactgccttagctcgttgagtactttcactttttcgtgggatgagctaaggctttcagcttttttagatacataagccgcgtttcaagaaatcgaacttgcctttcaagatcctcaatgcgtcggtcttttgacagctccaatgctgatgccgctttttctggatcaactgatattgcaatgtttcttttggtgccaatcttgagcgcgcgtaaaccagcttctccgcgctcttcatagaccttcagccacctggctacagaaccactaccagcaagcataaagtgagcagcagcctgattaagggacatgtgctgctcgatcacagctttcacgaccttaatacgcaactctggatcagcactaacgcctttaggtttgggaattaaacctttttctccatgtttttcatagagggcaacccatgtcctgacctgggttcgggggacaccaaaacgtgccgagatgatcctgtaaccatcatcagttgtgaagtagtgattcacgacttcaaggcgcttttcaaaagggtattttggctttgacatattaggggctattccatttcatcgtccaacaaaatgggtgcagtacatgggttaatgaaaaattaactacggggctttcttctttctgccgcacaacaagcatcagcagcagttccaggcttccggcaaggcgatcaacgacaaggtgcggatgtatgggcgcatcggtcaagcgttgattgaggccaagcaaagcggcagcgatccgttcgccgccatcgaggccgttatgccctgggacaccttcgccgccagcgtcaccgaagcgcaaacattggcgcggcctgccgactttgatttcctgcaccacatcggtgaaagctatgccacgctacgccgctacgcgccgcagttcctgggcgtgctcaaattgcgggctgcgcccgccgccaagggtgtgctcgatgccatcgacatgctgcgcggcatgaacagcgacagcgcgcgcaaggtgcccgccgatgcgccaaccgcattcattaaagactaactatcagaaaaactcatcgagcatcaaatgaaactgcaatttattcatatcaggattatcaataccatatttttgaaaaagccgtttctgtaatgaaggagaaaattcaccgaggcagttccatagaatggcaagatcctggtatcggtctgcgattccgactcgtccaacatcaatacaacctattaatttcccctcgtcaaaaataagattatcaagtgagaaatcaccatgagtgacgactgaatccggtgagaatggcaaaagcttatgcatttctttccagacttgttcaacaggccagccattacgctcatcatcaaaatcactcgcatcaaccaaaccgttattcattcgtgattgcgcctgagcgagacgaaatacgcgatcgctgttaaaaggacaattacaaacaggaatcgaatgcaaccggcgcaggaacgctgccagcgcatcaacaatattttcacctgaatcaggatattcttctaatacctggaatgctgttttcccggggatcgcagtggtgagtaaccatgcatcatcaggagtacggataaaatgcttgatggtcggaagaggcataaattccgtcagccagtttagtctgaccatctcatctgtaacatcattggcaacgctacctttgccatgtttcagaaacaactctggcgcatcgggcttcccatacaatcgatagattgtcgcacctgattgcccgacattatcgcgagcccatttatacccatataaatcagcatccaggttggaatttaatcgctgcctcgagcaagacgtttcccgttgaatatggctcataacaccccttgtattactgtttatgtaagcagacagttttattgttcatgatgatatatttttatcttgtgcaatgtaacatcagagattttgagacacaacgtggttcccgccatatgaaaatccggccagaccaacatcattctggcgctccgaaagaagggatattcgccgccgtgaccagcctggagcgggtcgcataatctttggccgcttcgtagtcgaggaacatggcatgaaccacggcagcctggcggctgcaaattgaaaaccgccccggttcgtcctgttgttgccgcacgccccgcagaatatgtatgctctgaggacctgttttattaaggactcatccccttatgttgacccgcaaaagtatcgatacagttctgctctctgttggtgctgagaagctctcacaacgagaatgggactggatgaaaatgctcaaacccatggacccaccacctgcgatggtgacgacctccatcctgaagcgccgtggcgatacagcagcccttaccctgctacaggataccggggtttaatccatcctcatgttgtccggttttactccccgccctctgaaacgtctgttcacagccaaccagtgctggacgtccttcctggatgcgggcggtctgcgcgatatcgaggttgaagccgtcaccaaaatgctggcctgcggcacacggatactgggtgtaaaagagttcgggtgtgataacccggactgtcagcacgtaaagtacctgaccaactcatgcggcagccgtgcctgcccgtcctgcggaaagaaggccacagacctgtggacagcaacacagctgaatcgtcttcctgactgcgactgggtacatctggtcttcaccctgccggacacgctgtggccggtgttcgaaagcaaccgctggctgctgaatgacgtgtgccgtctggcggtggagaatctgctgtatgccgcccgaaaacgggggctggaacccggtatcttctgcgccatccacacgtatggccgtcgtctcaactggcatccgcatgtacatgtgtctgtaacctgtggaggtctgaataagcatggtcagtggaaaaagctgagcttcctgaaagacgcgatgcgttcacggtggatgtggaatatgcggcagctgcttctgaaagcgtggtcagaggggatggcaatgccggagtcgttgtcacatatcacgacggaatcacagtggagaagcctggtgctgaaatccggcggaaaatactggcatgtgtacatgtcgaagaagacagccggagggcggaatacggcacgctacctgggtcgttatctgaagaagccaccaatagcggcttcccgactggctcattacaacggaggggcaagcctgagcttccgttacctggaccacaaaacgggagaaacggcgacggaaacgctgacacagcgtgagctggtcgcgaggctgaaacagcacatcccggagaagttttttaagatggtgaggtacttcgggttccttgccaaccgtgtgtgtggagagaagctgccgcaggtgtaccgtgcactggggatggataaaccggaaccagtggcgaaagtgtgctatgcacaaatggtgaaacagttcctgagtcgtgacccgttcgaatgcgtgctgtgtggctgccggatggtataccgccgggccattgcggggctgaatgtatcagggctgaagaaaaacgcgcgggatatcagtctactgaggtatatgccggcctgacacaggctaagtgtgcccgggaatcggtgaaagtataaaaaacagcctgttacggtataaaaatcgaccatacagagagggaaaccaccggagtggtgggaaaagcagaaaggctcacgtggcataaggcgtggacaatggtatcgactggtttttcaatttcctatacgtcaagatacaaaccaccttttcgccatgaggcagaaagcctcaagcgccaacagcattatatattgaccaggaattaaattcccagctttcggcgtggactatacagtgtgtgattcaccacgatgaatcctttgttgatccactgtgtgacctgcgcaggttgaactccggtcagcctggcgaacgatgcctgattcccccgatagaacttgttgatgtattcaatcaaaggcattttttaattctccgaaacaacgcaaaatcatatagtaatttactatatgatttttattccgcaagtgattaactcatcggatttctttgtagttaacgaaacgttaaatttagtttgtgcctggaatggcacgcaagaagcacactagcattatcattttgatcaaaacgctatttccccccgttattggggggctttctttttgatgccgcgccagcggcatgtaaggcggcactctgttgttttatatggcacagagctaaaccgccgaagcccggcgtaagccggtactgattgataggtttcaccttacccatccccatcctgctaagccatacccgctttcagccatgaaatagcttttgtgcgcggtcggagtggtcccgacaagggtttacccgcagtcggggcgtatctccgcgttagcggaccgtcagggccgcttacgagcgtgtatttggtacttccagccagaaggctgacagcgatgagatttcttagttacaacatccattattgaaagcgatgttgttcccgccctttgggcgggggcggcggcgcttttcagtgatgggttgggcactgtggctgagtatttgcagcgtttttttgtaggagggttggaggggctttgtttttcattaggcagaagtccatatgcccgccgcgaagcggtgggaggtacttttatattctgagcggcgcggcgttagccgctgcaagcgaaggcatttttgtgattatccacagttgtttcaaagataaatattttccctgcggcgaagcaacgcaggggattaaagaacaggggttaagaatatattgcgggtttgatgttctatgtttgctgctttctgaagttattcctttgcgggtttttgtggataaccgaaggcgtttttactccgataccctattgcggccatcaaaaaactgtcagagcgggacaaaatgaaaaacggtcgtcaaatatgaggaatttcatgaaatgcaggcaacacgaaaagccccgaaggggctgaagagagtgccgattgtatcaggcagctaaactagtggggtggcgaagctgtcagagccagttcaagctgacgtagatctctggctaccagttgctctaatctttctttagtgcaccagtacgcttcgtccggcggcatacgcttcagaataaaccgcgcaatttcgtttcgctgttcatcatacggcagttttgccaggcgattagcacgtttgcgctccgctgctttcttacgtcgggacttgatggcatcgagagaacgctgcgcataccagcgtttacgagccgagtgaacagagatttcttcgccctcgcggataacgccttctttaatcaattgcagacggatttcactttctgcaaggcgcttacgttgctgctcctgaagtttcaccagatcaactcccagcattttccagccagtttcggtgatccagacgtatttcggcagtcgctggcgggattcacgatcccatatcgtcttttctgacgttcccaacgtgccaaaggaaacctgctctgccagcagacgggaaaggcgcgatactgtgactgcggtttcaggaatcacgtctcccttactgtcttttgggcttatttcttctgccaggcgggagacagacatgccgacagtgtgcaatccacgatcacaaaaactcacaagtacaacccatattgcgtcaagcagccgctgtttctccggtcggaatttatatttgcgaccgacactctgacgtttcagtacataaaatggatgcaacgacatgtgcattctgagtgtgttctgaccagtgaccgggtcttttttaacgagacgattgtaagcgtggcccaactgtccgcccagcgccttatagttgtcgggacggaaccaggctggattctcacactttggcttagtggaatgttcaccccggcgacgttttgttgttccgcctttgttttcctgggggaccaggaatgagctttcaattcccgcttcgtagtcctgccagaaacggatctgctcttccggtgatagttcagaccagtgacgtttgctaatcacagcaagctgcacttagcttgcactgtaagagttgatatttccttctcatggaattaaactccacttcaggtaacaagcatacctgaaataaataagctcaaggctctgccttgatgtcagcccccgctaatcttcgctgcctggaaaacacgagattacgggggttttctttatctgaaatttacgttcttgaacaaaatttcagcacctcgttttctgcatttacaaatcgcggaaaacttgcctgcaaatttagcagcatgggcgcaatcgatcaacgatgttcaagcctggctcgtttcctttttgattcagcacacatctctgacagcttcaaaatcgttttcagaacagctactgaagccccttctttactgacgttccccatacaaaaccttacaaaatcagaaattcagaattttgtatattcaaaaaagtttttttgactgcatacacccactcacacgatcgaataaaccacacaaacagtattatctagatttttagatcgtacatcatttaacaaacagaatattattctgctttttagatgttatctagatcattagatcgctcacgcggcattgacaggttttaaatgtcgcacacacaatactatccagatgattgtaaaaagctcgttcatcgcgttttttgtgctcattgcctggaaaatgagcactctttgacgcccgttagaacgcttgtcatctcatgctctttaacaaccccggacagcggtcattgcctaaagccctggcataaggaggttattattcgtgcatttcaagcaccgctggcatctgtcagcaacgggctacgtaacagagtgacgtgccgcgccatctacacaggtaacgactctttatccgcaaatatcattctgcatacttaaacccccttatttggtgaactcgcgttgagttaatctcactcactctctccctgagcaagtcgtacaggctgcaacgcagaagtacaccagatttgccagtctccactccaggtaagggggtttagctatgcatgatgatgaacaatcagataaagagcctgtagtgagtggctgcaacttttcataattagcttatgacgctgtattccggggatgtttctatttcagacaaacaaccgggagaaaatatggcgcgtaagttaaaaattaatcctgtcattcctgaatgtgtggcagatttgaaaggatatccactctatatcatcgttgcttattggggattaagaaataataaaacgctcacaacaacggatgttagccgtaatttccttattacacagcaacaatcttatgatgtgcttacctacatttaccaggaagcacagaagcagataacagcaactaaacgaacactatttaacgagcacaaaagaagaattagtgcgttcaggattcttgatattgacaaaggcatattgcgcaccccaaaaaaagagattgcatatgccagctacgacaatataccaactgtaacaatgaaaagtacccgttgtgagatccaagatagttttacagaactgcgccgctggatgtgttcaagaaagacaggtgatcgagtggaggtatttttgaatgtctaagtaccaaataaacgcaaccatcaaaaaaccaggtggtggccccgtgaaatggactcattacagcgacttccctatgaccgctgaagaatgcagaaaaaacttctcaaaagaaaaagaagcaggaaagtgtttttctgttgatgttcatatttcagatttcatttgcaaagaaatacatccactgtgatgaatggggagaggattaatcatgattgacgctataattacgccaatagttacatctattccgttactcttattaattttagttgcgctgatattcgttaaatctgccgtcaaaatcgtgccacaaggtaatgcctggacagtggaacgctttggtaaatatacccatacgctttcccccggtcttcacttcctgatcccggttatggaccgcataggtcaacggatcaacatgatggaaaccgtcctggatattcctaaacaggaagttatttcgaaagacaatgcaaacgtaactatcgatgctgtttgttttgtccaggtcattgatgcagcgaaggcagcttatgaagtcgataatcttgcatcagctatttcaaatcttgttatgaccaatatccgaactgtcgttggtggaatgaatctcgacgatatgctttctcaacgtgacagcatcaattctaaactgttaacggttgtcgattatgcgactgacccgtggggaattaaggtcacacgtattgaaattcgggatgttaaaccaccaaaagaactgactgaagcgatgaacgcgcaaatgaaagcggaacgaactaagcgtgcccggattcttgaagcggaaggtatccgccagtcagaaattctgaaggcagaaggggaaaaacagtctcaaatactgaaagcggaaggggaacggcaatcagcatttcttcagtccgaagcacgcgaacgtcaggcagaagcggaagctcgcgcaacaaaactggtgtcggatgcaatcgctgaaggtgatgttcagtctgttaattactttattgcgcagaaatacactgaagcactccaggcaattggcacagcatcaaacagtaaactggtgatgatgccgcttgattcaagtagcctggtgagttcggttgcaggtatcagtgaactgctaaaaaacgtatcacaggatactcccaaagttgatatgaaacaggctcaacaatatttgtcttaaaacagatagcggacggtgacaatattgttttaatcaccgtccttatattcatattcacgaatgagcaaatcattaaaatgaaaacttatgggttcatccttcttattttacatataatccctatgggggcatggttctttcttctttttattacaaacgatgagaacaaagtagaaaaaatacaaaaccacatcgtatcaatatttccattatggctgaactggggaggggtgatgatagcgatggctctactgcccctgttaatatggagttttaatggcatattcttcggcttctttctgctaatttatgcatttggcgtttataactaccttcatcttctttattcaatttctcccttttatcatggagattagccatgttatggtatacactatttcttctgtgtattgcacttgaacttataaccggaacaggatggttactcttaatcagtcttggtgcattatcaagcgccattgtgggcttttttcttccgatatcacaagaagccaatatatgcttctttgcgtcaatcagcatactggcgtcgataattaagttcttctatgacaaaaaacataagaaattagacactctcctggtgaacccagggcattcacgttttaaaggaaaagaatttacgctcagtgacgatattgttaacggcaaggggcaattactcattggtgatacattctggcctgttgagacgttacacaatgaaaactaccttgcgggaacaagagttattgttacagacatgcaaggaataactcttaaagtaatgaccatcgaagacaagagtgaaaacaaggaataaatcatgcatctttcgttgttaattccgcttacaggagcagcgatgaatgcactatgtatttttattatcagacttctggataaggattttattgaagtctacaaaaaaacgctaaaaaaaattactgcattacatattttattgatggtgttaagtgtcacaggaatagtatgaggacaattctatgcgaaacgcaaatgaaggaatttctcttgcagctattgtagctaaagaaacaacaacaggtaaatggaatggtactggtgggggtattggtttaggtactggtggtattggcttattcatcggaggtgtttctggttctaaacaagagcagacacaaagggcaaaaaactttgaatcgcctaaagaggaagaatacagtctattaaatgtatacggttcgataataaaagttctcgttttcggcgtgctatttggtttatctgcccgtttatttacatctttatcaaacactggttctgattttgctgaaccagtaacaaccaccacagccacaggaaagattcaatctattatgggtggcatggcagaaatggtaagcattttaggcaccgttgtcccttttttagtaattatcacagcaatgatctggtttctgtttttcagcagcaaacgagaaaaagaagagttaactcgagttgaacgtgaagctgctaaaacaaaactccgtatagatgtctatcaccgtttacgttacgttgaaagcgatcatgtcgtttttgacccgattacaggccgggaggttccggcagaacggacgtgtattaataaactgattgaggcacttgttgatgaaagcaacgacatctcaaaaagaaattgacgaacttctgaatgcaataaaaacaggacattcaaaattcattctatcaatacccgtacatactacccatccaatggcccataaaataatgaagccttacttcaggagaacaggaccgcttctgtattcagatagtatattcaggatttgaagaaagcatttatttatatagggcatacaaaaatgagtgcttttattaagctggcatctgttctggcgttatttattagcccggttgtggttgcaatagcaggagaacaatctcactgtacaaaaatcaacgaataccctttcatcgtcactcaatgcgacgacggaactgtgacagtggtaaatgtgataaataaccgtgtagctgtgtgccgtaaaggggaatcatgcaaagaaataaa

SEQ ID NO: 162 - DNA, 65373 bp, Artificial Sequence
  plasmid TP114 delta pilS::cat
attataactctggacacattacatgactcaagcaaaagctaatctgagaaaacttcgccgtgcacgttatgtcccccctcgaacagtaaagaaaagcatagcgaatacagaacgtgtcgtttcaaaagcaattaccggctgtggtgtcttccgtgatataccacaagtaaaaatcaatctcatcgaaacaaggaaaattttacaaatcgaactggctttatccattgctaacttatctgaggcgaatccaattgagatacgaaaaaaaatcaaaagcattgaccgacaattatcttcaacctcaaaaatcagaactacattatgaaaaaaaacgacgatttaatcactttaccacctcataacagccacgctctcgattacatcattaaaaaagcgtttacaccacgtaaaaccaaaacatcgacagcgacccacaacgtttatagttacaataaagaagaatccacattaaatttccaaaaaattggagaagcaatttttttcggcacagacctggtaattaagctgaagccaaatattagtgcctctggtgaactcttcatctgccagaaggactaagctatgaacattgtttcagaatttcttgagaaagtaacaaccattgttgaatccacagcggcgacgaacgccgctaaggtcgcacaggcaatatctcctacattttttgcggctatagccttatacgttatttatctaatatatgaaatcacgtatgcccaacgtgacatccttatgaacgaggtgacgaagaatatcggtgcattcgccctggttggtgcattcacttattcagcgccttattacagccagtttgttattccttttgtaatgcacgctggctccgacctttctgctgctgttactggaggttcaggaactgcaaccagtgttgataatttgtggaacgctctatctacgaatttaaacaacttccttgatacaagtatgagtatttatggaaagttccaaattgctgagaaaatgggggtttatctagtatgggggattggctatatcggcggaatgcttctcatctattacactactgttttcttgacactatcaactttcatggttggaattcttctttccgctggcattttattcatttgtttcgctctattttcatcgaccagaaatatgtttactgcatgggtcggcagttgtctcaactatatactgttaaatttattctatagcatatcatttagtttcttaattagtttcgttgaatcagttgtccctgttaatggagatataaaactatctattgtagtttactttttccttattactattatttccatattccttatagaacaagttggcacactctgttctacattaacaggtggggtaggtataaatggccttacatcagccgctaatggctttggaggtaaggttgcatctggttttatgcgagcatcaggactccgatctttcaccaatggatttgccagcaaaatgccaaatccattctttaatgcaggaagtcgttctgcatcagcattagttcagggattaaaccgtggaagtaaacttaaagcggggtgattaacatgaaagataaagtattatcatttctctttgctggaataattaccgtaacatcaccatcaatctttgcatctggtattccagtagtagacgttacagcgatagctaaaacagttgaagaagggctaaatcgtgccgctgaagcggcaagacagcttgagcaactcaagcaacaatatgaacagaccataagatacgctgaagaacagaagaaaagactcgaaggcttcactgatttcagcaatggctttgatagcgcatccagctatatgaaggattctctatcaacaataacaaatagtgcaaaatcagatcttagctctttgcgatcgcaatatgacttatcaagcaacattgcagagacgcaacaaaaatatgatgcaatcctggctaagatcaaattctatgaaaatttcaacaatgaaatgcaggaaagggctaagagattaaccacgttacagaaggagttcgcgtcagcagatactccgcaaaaaaaagctgacttatctaaccaattgaatacagaaaaattgacaatggagctacaattgaagcaatatgatattgcagagagacagctaatcgcgtctgaaaatgcaagacaagaggctgttagtcgagaaaagtttaaattaatgatgcaataggtgttcgaatgaaaaaattcataagcactttaactatcttgtcatgcttccttttagctgcttgtgaagacaaagtttatgatgtcagttactacactgaacatcttgaacaagcccaagatgttgtcgaaaaatgcagcaaaggggatatgtctggtcaaaactgcgaaaatgcgcgtgaagccattcaaaaagagcaatcgggtaaagcatttaaaaatatgatgcaataatccttcattaaaaacagctcgcaaagcgggctttttttggctgtacgcagtgaccagttgataaatagttctaatgttcgtgctgcattagaacaacgcacaaaaagaagagtacaagaagacagtgcgggatctaatggaacgtttacaatagaatcaccttccctatagcaaggtgattctatttaaaagaatacccgcctcgtgcgggtcttatcttgcttaaagatctatgaaacctccggcttcgggtattaaactataacttgctttggcaaatattgtttcattgacttcatggaatcttattttctccgcctgttcatatgttacagggaagaacacgccccctggctcattaaacatcataaaatcaccttgcattgcgttacaatgacaacaatgattcgcgtaatacttcatttttgctgttttgctatgggatggataatataattttgaatactcattaatccttgagagagcagaggttgaaattatttcaattttcgttaaatcagtccaccatactctactggttaaccaccgataaatcatatttttctttgaatcaaaatactccatacccttaggggaggatgtttcataccattcatctaatatacaatcttcccattcggcaggatcaactccccaaataacgtctctatacttataccaacgaggcaaaaaaacaccaaacacaggagttattttcttacagcgccaacatgactggtaactttccgcaatataaaaacgttgagaaaaaatattgtaatcatgttcgtttaattcttttacccactgaataaaataaattggatttttcccctgtggaacaaaccatttccgttgttcttgatcccattgcgcccctttttgtttggctaactccttttcttcaaaaggtacatttaaataaaaccgcgccataaccaacttaactccagtattctgttctgatgatgcaacaggatagatatcaaaactaaacaaagagtgcaattccgcctttaatggctcattcgtacccgcctcgtgcgggttttcttttgcctgaaatatggaggaactccatgaaatccatcattttatcgatggttgccgccaccgcattactgtcaggctgcgcggatagcaaaacacaaccagtacctgagtcaccgttaaccaaacatgaccatcagatcacgttgaaaattgataccgtgcgaacagacctgccggacagttctcctgtttgtttgaatggtatgaatatatacgaaagtctgagcgagcggcatccaggcttgtttgccaaaaatcagaacgtgattttccgtagtgcattctttgatgacggtcaggcgatatcctccgaaacaatccgcaaaataatgcagagtaccccgtgcgttgaatcacaaacaacatctgccggaagctgggaacctgccacggaactgctcccccgtcaggcaatatccggtgacactacactggctgaaaaagatcggactgctggcttcacaatgcggatagcaccggagattgagcgtggaaatttccacctgctactcacaaccactgacccgatacggaaacagactgtcgagcagaatattttactcaaaccggaccagccccttatcgtgagtggttttactggagttaatgctgatagccaaagtgagaaccggattgtcatcattacgccacacgtgcgttgattcccctgatatttaaattacccgcctcgtgcgggttttcttttgtctgaaatatggaggaacaccatgaaatccatcattttatcgatggttgccgcaagtgctatcgcactctctgcccccgtatatgcgtctgatccgtgtgcttccgttctttgtctgtacggtaaagctatcggtagcggcggcgggagcgaatgcaaaagcgccgaaaaggacttctttaatatcataaaaaagaaaaagggatctattcgctggagcaaaacctttgatgcccgaaaagcgtttcttaatcaatgcacgaccgcagaccctgcggcgatctcaaaaatcatgagtaagttcggacgttcctggggttaaccatgaaaaagctcattattattcccaccacattattgctgaatgcgtgttcccatgcccctgaacccgcacaggcaaaaggaggttggtatgaactgaataccacaattgagcaggtaagagcagacacatactataacggggtgatccttcagcagcccgtgtcacagccaaacagcactgttcaatacagcaatgataattatctcaaaaaggaaaccataaacgtaactcccgcgcctcgtattgcagaaaccgtaaaaccacgttctgagcaatcagcgacagcgccaaaaaaccagggcagcaataatagttttctgaagccgacaacaaacagcataacttcatctggtgagataaaaacagcagccaaaggagcaactaaacagcattctgaacaaccagcactctctcccgcaaagccaatcagtagcaacaaccatcaggcacaaacggcacaaaagactgatcagcagacaaaaccgcgtcctgaacaaccaccgctaatgtcaaaaagcggttttctgaaaaaaaacgctaacaacgctgttccggccaccacgcttacaggcccatcaacacctgaaaagcaaatttactttgttcgccatgatggtaaaggctcgctgcaaaaagcattaaaagaaattgtcccatcggactggacggctgaaatatccccggaggtaacgaaaactttccgtcgcacgatatcctggcagggcaacgatcaatggccttatgtcctggataaaatgcttcgcaactacggtctgacggtaattaagaacaccgaaaaaagacatcttctgattgattttcaacaacagaaagggaaaacatcacaaaaagcacctgtatctcctgacaaaacccctgcatctcctgtcaggacaccagtttcctctgacaagttacctcaaaaaccgctaacgcctgtcaccgttccgcaaaaacagacagaaaaactcacctggaatcttaaaaaaggttcgacgctgcgggatggcctcaccgaatgggcgtcaagttcaccgtgtggtaattcaacctggaatcttgtatgggatactcctgtgaactacagaatagatgctcctcttattttccggggaaactttgaatctgcattaaaagatacgctgatgctttatctttcagcagataaaccgttatacgcattcaggaatattgcacaatgcgtaatcacaattaaagacacacaacaggagtaatcgctatgggttggttcttcagcttgctcctgatattcctgtcaataggcagttactatctgacagataacaataaccaaaccatacagcgaatgaagttgcttcctgcaaaacaggaagcaattgaatttgtccatttcgcaaatgttatcaatgactatctttataaatatccagacaaacgtaattcaggaggaacgttaacatctgagcaaatcggtataacacccgtttatgatattcatcatattatttacggtaagcgagtttatatctggtctgccgatacagaaggtctgatgtctgctttgcagcagcaaacaaaacattcagcaatgttaggaagagtaaaaaataagaagattgtcgataatcaggggaatgatatgggcgttcccgttccttcctccattccagaagaggctattgtactcattaactaaatatcccctgacaaggggattctgaactggagtctgcatatccgacacatcattatgtgggccggatatatcgctacggcgcggacttcagtccagaaaatctttaccggagatacccatgcaggataatgatgatgtcagcgagcttgatattgccactcgtgaagtccttatcttacgatgcaatcttattcagcttgcttctgaatatataaaaataaatcctcttaaaaacacccgaatctacacagatttaattcatcgttcagcagatgttatcaaaaatatcgaacaaggtaacatccagaataaacataattatctgtcacaggatgtaaaacatacgcttgttttatacgacctgtacaaatcagactttgaacaatgtccgggggcaaaatcccttatacctgtcagggaaaaaattgtctcgctgaaagaacttctttccggcgctaatgagctggacagtatcgttcgtcgcccccgcaggaaaaaacgttcttcacgaatttaatatcaggagataaatcccttatgcagttatcagcggctgttctggcagcactgataagtcagtgtgcccctgatgtatcacccgatacgatgaatgccctgattatgactgaatcaggggctaatccatatgtaatagcgaatgtttctgacggaacaagtaagtattttaaagatgaaaaaggagctattgaatatgcagaaaaattaacagcagaaaataaaaggtttagtgcaggtctgacacagatatacagcaaaaatttcccatcactcaatctgactaataaaacagtttttgacccgtgtacaaatataaaagcaggagcggcagtcctgacggacaattatctgagacaaaaggagggtagtagtaatcaaaaaattctccgcgctttatctttgtattattcgggtaacgaatcaacaggatttattaaagaaaagaaatttaacaacacttcttatctggaacgggttattcgtaacgcgaataactatatcgtgccatcaatccgtgaaaaaactgatgaatcagaaataaaacccccgaatgatgaagagaaaacatcaccggactgggatgtttttggagattttagttaatgaaagtcaaatcaactttgcagtattttatcctggcgtttttcctgtcactaactgcctccgttgcctatgcaggtggactcgataccgcaacaaataccatgacagaacttaagacatgggcatttagctttggtggtgtttgtgctttgtgttacctgatctataacgtcatcatggcattcatggagaagaaaagctggtctgatgtaggaatggcgcttgtctattgttccctcgctggcggtgcactttacgccgggaactgggcgctggaactcttcaaataagtaatccatatatacaactgtgccgcatatttaccttatgtgtgaattgcggcttttttcatggtgagttatggacaaagtaaatgaacatgtcagtgagtcattcatgacttataacgggtttaaccgtcctgcgttaattgctggtatacccttaatgttgttattgttcacggcttttttcgctgttctgacaggcttccccgctattttcctttggggtataaaagggataattattcctgtcatatgtgcgctgtttctttttatagtaaaactggcctgtgaaaatgactcaaacgcactaagagtcatccgtttaaaccttatggggcttttgttaaaaatccgccacagagatttaattattggttattcatctgtcaggtaacatatatgcacaaaatcaaattaaaaaacagtgacaatatggatgttgctcgtgaatatcccgattatcgcttccatataacagacagtattatctttacttctgacaggaaaatgctggcttcacttgttgtagcaggcattccatttgagacagagaacgataatgttcttacaaatttatttaacagcgttaaaaacttcctgattgggttaggaaaggaaggcgacctgtatttatggactcatcttatcaagaaaagagcaaccatcaatggagaatggaattttgacaatgattttttaagcaggttttcaaaaaaataccttgctctgttcacatccagcgcattctataaatcaacatggtatctgacatttgggattccctacgatgatgttgataccggaatcgagcgcatgaatgaaatgacacaacaggcgcaaaaagcacttctaccatttaacgcttctttattatccgtttacaatacttatattagtgaggtggcagactatctatcactattgctaaatgcagaacataacatgattcctttatcatccacccccttatcatccagtatttgtgattctgaatggtattttggtgctgatgttcttgaactgcgtaacaacgaatcggatagtaaaaaattcgcaacgaattatattttgaaggatttcccgatagaaacaacccccggacaatgggatttccttctcaaacaaccctatgaatttattcttactcaatcctttatttttgagtcaccaacaaaaaccctgaagaatatcgattcacagttaaacaaactacaatcagctaatgatgcagccaaaatacagcaggaagaactcgaagctggtaaagaagcggtcgcagccggaattacgttgtttggttcactacactgcgcattaacggtattcggtgatacaccagatcaggccagaagcaatggtataaagctctctgctgagtttattacttcgggtaagggattccgcttcagtcgcgcctcactcgcatcaccttttgtttttttcagtcatatgccgctgaataagaggcgtccactggatacccgaagaacaattaccaacctggcctgtctgatgtcttttcacaattattcctccgggaaaaaatcaggcaatcctattggtgatggctccgccataatgcctttaaaaacggattcaggcagcgtttactggttcaatacacattacagcccaccggaaaaaaatgttaccggacaaaaaattgccggacacgcaatgtttcttggcgcaacaggcacagggaaaacaacatttgaagcaacagccagcggctttcttcaacgctttgaccctttaatgtttgttgtggattacaaccgttctaccgaactttttgtccgcgcatacggagggagctatttcacattgcaggaaggtatctataccggctgcaatccgtggcaactggcagaaggcccggaatcgcccgtctggcacagacttctcgcatttctgaaacgctggacacaggttctggcacgagacaaccagggcaacccctgttctgatgaacatggcattgaattaaacgctgccgtggaaagcattatgcgaatgcctgtcgaagaacgccggacagcccttcttctcgatatagtcagtcctgaacttcagacgcgtctcgccaaatggtgcgacaacggcgaatatgcctgggcggtggattccccccggaataccttcaatccactgcatcataaaaaagtgggatttgatacaaccgttgtcctggacacaaaaaacggtattcatcctgcctgtgaacctttactcgcggtcctgtttttctacaaagaaatcatgcaacgcggcggcaatctgatgctctccattattgaagagttctggatgccagcaaactttcccatgacacaaagcatgattaaaagcgcactgaaagcggggcgcatgaaaggtgaaatgatgtggttaacatcacagtccccggaagacgccataaactgcgcaatttttgcggcgctggtacaacaaaccgcaacgaaaattctcctgcccaatcccgatgcaaaatgggaaggatataaagaaattgggcttactgaaaaagagtttgaaaaactcaaagagctgacgaaggagtcaaggaccatgctcatcaagcaatctggctcttctgttttcgccaaaatggatttgtttggattcgatgagtttatccccgtgctttctggctctgaaactggcctgtctatttttgatgagattattgctgaaaaaggagatgtagctcctgatatctggataccagaactcctgaaacgcctgaacggttaatttctctgttttatacagaacggaaaacaatatgaaaatccccctcataattgcctccgcgctattaattagtgcatgttctcacacccccaatcctgtgcagaaaaaagggggatggtttgagttaaacacagcaattgaacagatcaaagcaggtgattattaatggaaaacacaaactattatgaacattcaaaaaaagaagccaccaaaaagaaatttgaagaaaaaaacgaaaaaaaggattatttcaaggccatacgtgactttgagcgcagtgaaattgaaatcataaagaaaaaggcaaaaacatttaccattctcgccattggtgaatttgttgtaatttgcattcttggtttcgcaatagcctcccttgctccattaaaaaccgctgtaccgttccttgtgcgagtggataacagcactggatatactgatattgcccctcaattatctgatgctaaggaaagttatcaggatgttgagactaaatatttcctgtcaaaatatctcattaactatgaagcatacgactggcagaccatccaggaacaggccgatacagtaaaaacaatgtcttcccaaaaggtgttttcagcttatgacaccatgattcgtgctgattcctcaccactgaacattctgaaaaacaactacaaaattaaggtccagattaattcagtaatccttctaaggaaggatatggcgcaggtgcgtttcaaaaaaatggtactggatttatctggtaaacccgcccccggatacagagcaacagagtggatttcgacgatttcttttgactgggataaagatatcaaaacagaaaaagagcgccttgtgaatccgctgggactgcaagttctgagctaccaacctgatccagaggttataaaatgatgcttaaacgcactactgcgatagttcttttgtcgatgctacaagtacctggtgctttagcagctatgtacggcacaccatcggaacgagacgggcgtattcagaccgtagattataacgagcaggatgtatttaatgtgcgcgtaaaagcaggcgcacaaacaacaattaagttcggacaagacgaaacaataaaagatgtcggaattggtgatccagaagcctggtcagtatcggtcagggacaacactctgtttctgcgtccaaaagcagaagaaccggatacaaacgttaccgttcagaccaataagcatatatatcctctttacctgatatcaaccacgaaacaacccacgtatattctgcgttttaattatccgaaaccaccgtcagctaccgtaatgactgaaaagccatttccatgcactgatggtggaataattaatggtcattatcaactcaagggggacaaatcaattttcccttatcaggtatgggataatggcgaatttacatgcatgagatggactaataaacaggaaattccggtcctttatcgtgttgatgccgatggaaatgaacatctggttaacggagacagaaataaaaacacaatggtttactatgacgtggctgaaaatctccgtttgcgcctgggtgatcaggttgcagatatcagaacatcatcaatcgttaatcgtccgtggaataaaaaaggtacgtcaaacggaaaaacacgagtagagaagttcagctatgaaaaataaagatgatgaaaaaaataatgacgcgggaaatcgcggaattatcgaagtaaaaggtaaagcagcaccaaaaaaaatattaatcctcatcatattactgattgccgcgttatttgtgatcattatcttgtttaaagttctgtcacgagaacaggtcgttcagcaaacacctcttgagaagtctgacgagacactggtcacaaataccaacaatggcgtttcactgacaacaatgatgaaaaacatcgaagaaaaggaaaaactcgatgccgctaaccgcaggaaagcacaggaggagcaagaacagaaacaggcagacaatgccccgtcagcgccagcatcacaaaaggccgatcaaacagccgtcaatgtgatagccaacggcactccccaaaccgccagtggagatccaaaccaaccacaaccattgccaaaatccgtccgacaactgatgggcgacacaatggtgaagatcgacaatcaggaaccaggcgaaaaaaaccaggaaagagatgatttacagggcagtcagtacgcagacggaaaggtatcccctgtgctgaaccgccgatatctgttatctgcgggaacagcattatcctgtgtgctcaaaacgaaaatcgtaacctcttatcccggtatcacaatgtgtcagttaacacgagacgtctggtcggataacggcgaagtgcttcttgcccgtaaaggagcattactgatcggggagcagaataaagtcatgacacagggagtagcccgtgtgttcgttaactggacaacgctcaaagatgaaaatgtcaatgtgcgcattggcgcacttggcactgacagtctgggtgcttccggccttcctgcatgggtcgataatcattttggtcagcgttttggtggtgcattgctgctgtcattacttggtgatggtttagatattctgaaaaacagcacgcaacaaacaggctcaaacagcaatatcacctacgaaaacacatctgacgcaacaaaagaaatggcaaaaacaacgctggacaatacgataaatattccccccacggcatatattaatcaggggactgtattgtctgttattgttccgcgaaatatcgacttttcatccgtatatgaacttcagtaattcagtaaagcaattgatatgaataacatcagagataccagtaatacatcacaaccacgagataacagtaaaaccgcaagacgatatctggatatgacgggtatccagtctgttcttaatattgaacatgtcacagaaatatctgtgaataaaccaggaacaatatggtttgaaggaaaaaatggctgggaatctaaagatgcgccagacgcgacttttgataatttaatgacacttgccaaaactctgacgaacttatcaaagataaaaataccacttagccatgataatcccattgcatcggtagttcttcccggtggggaacgtggacaaatcatcattccacctgcaacagaaaataacagcgttgtgatatctatccgtaagccatcattaacgcgctttactatagatgattatgtccgaacagggcgttttgataatgtcaggattgcgacgaaacacgaagccatcctgactgaacggcaacgctacctgtatgaattatcccggcgtccagatggtcaatctaaagctcaatttttaagagaggcagttaaagaccgtcttaattttttaatcgtcggtgggactggctccggtaagacaactatagcaaaggcaattgcagatatctttccacctgaacggcgttatataaccgttgaagatgtaccggaaatgtctctgccgctgcatccaaaccatatccggcttttctacaaaaaaaataccgttgaagcgaaggaaatcattgaagcgtgtatgcgattaaagccagatcacatctttcttgctgaacttaggggtaacgaagcatggagttatctggaggcgcttaatacagggcatgaaggctcaatcagtaccattcatgctaataatacttatgcctcattttcacgactggcaagtattgtaaaacaatctgatgttggtatgactgttgatatggacctcatcatgcgcacgataaaaacatcaattgatgtcattctttttttcaaccataccagaatgactgaactgtattacgaacccgaagaaaaaaatcgctttttgagcacaatgtaaattctggagataactatggatgcaaaaaagacggggggattaattctcttcctgttactgcttcttgtgggtgtgcttatagcctcaaactatctcggtggatacacagcattaagatattcatccgttgatatgtctttgctcaagtgggatacattccattctgtaatctcaacattttctggcaacccacaatataaaaaactcgtttttatggcatggtttggattcagcgttccattaatattctttgccatattcatgttaattgtcgtgattgggattatgcctaaaaaagtcatctacggtgacgcccggctcgcaactgatatggacctaagtaaatcaggttttttcccggataaaaaatcaccttacaaacatccaccaatactcatcggtaaaatgttcaaggggagatacaaaaaacaatttatttatttcgccggacaacaatttttaattctttatgccccgacacgttctggtaaaggggtggggattgttatccccaactgcgtaaactatccaggaagtatggtcatactggatatcaaacttgaaaactggtttttatcagccggattcaggcaaaaagaattagggcaagaatgctttctctttgcgccagccggatacgcggaaactatcgaccaggccattaaaggacagatacgctctcaccgctggaatcctcttgattgcgtcagtcgcagtgatttacttcgtgaaacggacctggcaaaaattgctgcaatccttatcccggcaagtgatgatcctatatggtctgattctgcacgaaacctttttgtcgggttaggactttacctgctggacaaggagcgttttcacctggaacagaaagccaaaggtcataatgtaccggacgttcttgtttccatcagcgccatactgaaaacgtcggttcccgatggcggcaaggatctcgccgcatggatgggacaggaaattgaaaaccgtagctggattagcgataaaacaaaatcattcttctttaagttcatgtcagcaccagatcgcacaaggggaagtatagaaacaaacttttcatcaccgctgagcatcttcagcaaccctattactgctgaggcgacgaatttcagtgattttgatatccgggatattcgtaaaaagcccatgtcaatttatcttggtctgacaccggatgctttaatcactcatgagaaaattgtaaaccttttcttctcattactggttaatgaaaactgtcgtgaactgccggaacacaacccggacctgaaataccagtgtcttattctcctggatgaatttacatcaatgggtaaatcggaggtcattgaacgcgctgttggttttacagcaggttataaccttcgctttatgttcattcttcagaatgaaggacaagggcaaaaaagcgatatgtacggtcaggaaggatggaccacattcactgaaaacagtgctgttgtgctttactatccgccgaaatcaaaaaatgctctggctaaaaagatttcagaagagattggggtgcgtgatatgaaaatatccaaacgctcaatatccagtggtggtggtaagggaggaagttcacgtacacggaatgatgatgtaatagagcgcccggttcttcttcctgaagaaattgtgtctctccgggataagaagaataaagccagaaatattgcaatccgtgaaattataaccagtgaatttagccgaccatttattgccaacaaaataatctggtttgaagaaccagagtttaaacgccgcgtggatatcgcccgtaacaatcatgttgacattccaaacctgtttacacaagaagtcatggatgaaatagcaaaaattgcagaaatttatctccctaaagctggaggaaaaaaagtcatggttgccggaggcaatgtgattactaatccagaccttgataatcacgataaaacagacgtatctgaataatcctcgcaaccagcaaatagtattttgcatattccataaggtaattaaacatgaataaaaaattgctttgtttattaatatcctcttttttattatcaggctgtgcaaacttcaaaaaaatcaatgctaatgaacttgctgccgaaagagacgcacaaaaagcgactgaatacgcgaaaaaaattcgtaataacccggttatccaggattcaacaaaacaatggattaatacaacgccaattattgaaaagcaggtaaagcaatcagcgccgccctgcccgattgtgattaatactcgttcagatattgagctacgccagatcgcacaacgcatcacacaaacctgtcatatcccggtacgaatcagcgccgatgtctggacctatctgaacggtacaggcactggctcaacacaacaaatgacaggctcaattccagcacctgatgcaaatggaatggttcctctggcgtcagtaggcagtcagccagtaaaagtctcttctggcggtacatcactccctgaactgaatatctccgggcttcctgccctactgcaaaccgtatcttcacggctgggaatatcctggaaatacgataaaggtcgtatcacattcttctatctggaaacgcgctcattcccgattacatatatggacagcaatgtggcatacaactcaaaagttgtgagcggcacaatgtcttccagtggcagtaccggctctacaagttctggcggtatgactggcgacgcatcaaatacgcaaactacaaccgtggaaatgaaatcatcgctgtacaacgacctgaaaagcgaagtttcctcaatgctgacaccaggtacagggcgcatgtatctgtccacaggttcactgacagtaacagataccccggatgtactggacagcgttcaggagattgtgaacaagcgcaataatgaaatgagtcgtcaggttgtgctgaacgttgaaatcctgagtatcaagaaatcaagccaggaacaggcgggaatcgactggaacgcagtatttaatgatggtcatcttggtctgagtcttggtggctcatttggtgatgccgccgagaatgttattaccagtggtgtatccatcgtggacggtaagctggctggctcaaaagcatttctgaaagccctgtcgtcacaaggcagcgtcagtgtcgtaacgcaaaactccgctgtgactaaaaacctgacgcctgtccctatgcaaattgccaatcagcagggcttcattgaaagtgtcacaaccgattctaccgccaatgtgggatcatccacgtcactgaatgcggcaacaataacaaccggattcaatatgactctgcttccatacattcagccggattcacaaaacctgcaattgctgttctcaatgagtctgtctgacaaacctacttttgaggtgttcgaaagtggcggcagtaaagcacaaacaccgaatgtggatttgaaaacaattaatcagactattgatctgaaatcaggccagacagtcattctgagtggattccagcaatcaaaccggaaaaccagtaagcaaggtgtaataaccccctccttctttggacttgggggtggcgttaacagcgaagacggcgacacgattctggtcgttttgattacaccaaatgtgcttaattccggctccagtgcagtaataaaaaatgtgaactaattaactgaaaactccctgaaaaaacacagggagtttttttggaggtcactttgtctgagaataatcagaataaccagaatttcacttcggttattaaaaacaagcgtgcttttttctccggtctggactggaaaacgcttccttcagaagaaaagaatgcgcgtacattcgcaagaaaaaacgacgctgaatattttctctcctgtcagtatcaggattcagaaaatgaaaccaaaacgatggtggcatttatcagaaaagaggatcttcccacaggggcgtcctcattctggtcactggcactgatgataaaacccctcatcgaacctgacggatacgctatctgcgaactcggtgatctttatggctttgtttcctgcgtcaataacgttctcgtcaacgatgttgtaggtaacaaaagtcagatcatgagtgctctgacaacatttcttgagtttaatgaaacaccagaacccggctggaaactataccagcctgaatcatgggatatcagccaggcactcccctcactcactctgtctgcgttgattgacgtaaaaaaaccgccgaaagaggcggcgtttactcgcgtatcccgaaaacgtcagttcatgatttatggcggaagtgccattctggccatactgctctggaacgggatcaccatgtaccaggaataccgggaaaaagaagctgcggcagaagctgcacgtcttcgtctggcaaaagaaatggcagacaaacaggcaatacagattgccccaccgtggcaacatttacctgaaataaaaccatttattgataaatgcattgataaatgggatgcactgcccttatcgatcgccggatggcgttttgaccttgctgaatgcagcacatccggtaatgacgggctgttacgcacatcatataaggaactgagcggcgttacggtcgaggacttcagcacacggatacgagaaatattccaggggacaaccacagcaacttttgtattgccagaaggcagcgccgggggattttctcttcctgtcagttttgacgtttcgcctgatccaattaccccggacacattgccacaggcaacagatattcaggaacgcctgacaacatttgcacaaaaaatgaggttaaaactcacctggcaggaaattgaaaacacaaaaacagatgaagaaggccgtccaataattctcccgtggaacgagtatgaattaatgattcagaccagcaccccgccttcaatacttttcgctaactttcatgaacctgccgttcgcttccagtatgcaggaataaaactggaagaaggaagactgaattatgagattaaaggtgcattctatgttaaaaataattaaaccaacgattatttctgtctgttttttcagttcacttgcttacgcaacagaatctgaaagcacaccaaaagacgaaataaaatattcatctccgaccattttacaggtagagcagattcaggctgaaacggtaatttacgaagcaaagctggcgcgtcagaaggctgtcagtgaattgcgtaatcttgatttgaatggtgtagcgtccgcaacgccagcaataacgccctcttccgggtattcttctcttgcagataccgatataccagcgcaacgtgtagccgctaaatcacttcgtgttattgaaatatttggtacaccacaacaaatgtcagcacgaatttctctcctggacgggtcagtaactgatgtcaaggtcgggcaaagtattcctggtacttcttataaggtggcatcaatcactggtaatggcgtctggattcagaatggtacagagaaacgccagcttattctttaatgctattgaaagagacgacacataatgtttttttctgacgcagactatcccggaaaagatatttctgatgttgtatacgtcagtatatctgaaaaagacgataaacctgttcaggtttatatcgctgataacagtaaaggacagcgtgctgttcaggcttatattggcactctgaatgttaaatatcccggacaggtaaatataacctcgacaactcttgatgttatcgcatcccgctaccaggacagcgaaaaaaggtctgattcaaactcatcacaacacttaaacagcaaccaggaaaaggtcattagctacctggcgaaagcaaacaaactgggaagttccgatttgcacatcacacctggtcgggacggctccgagttcacttatgtcgaagcacgcgtgcatggggaactggaaattctggatgtcatcccgcgtaaagaagggctggaattgctgggtgctgcctattctggaatgagtgatgttatcaaaggtacgcagtttgaccctgcaataccacaggatgcacgtatcgcagagaattttctgaagcctgtaaatctttttggggcgcgctattcgcattatccgtgcgtgggtggtgtgtacgcggtcttccgcctgattaaagatgacagcgaggatattcccactttcgaagaacttggctacatgccgcaacaaatccagacaatcaggcgaatgttacaacgcccggaaggaattatcgttttatccggccctacagggtccggtaagtcaacgactctgagaacggcttcagaagcctatctgagcacgtttggtttcaaccataacgataatatgcgtctcccccgaaaacgccttttcaccattgaatcaccgccggagggccgcattcccggcgcaatacagacggcagtcagggattccgtcgatggctgggttgacgcgattaaatccgctatgcgacttgatccagacgcgatactgaacggcgaaattcgtgatcacgcatcggcattagcagcaatcaaagcctcgatgacaggccaccttctgttgacgaccttacacgccaacgatgccctgaatattattgagcgccttgaaatggagaatattcaggccaggctgattgcagatcctcttctgtttatcggtctgctgagtcaacggctggtacaaaaactctgtccttactgtaagcgcacttatgctgaaatggcagacaaactgagtacagaagaacggaaactcattgaggaaaattgcctgccggaacaggtccggttgcgcaatcttgacggttgcgagcactgttataaaggcgtaacgggaaggacggttatagcagaagtcgtctcacccgacgcacgtttttttcagttatatcgtcagtccgggcgtctggaagcaaaatcatactggcactatgaacttggaggaattacccgtaatcagcacttattacacctgattaatcatggcctggtagatccgctgtccgcacacttcatatcccccattgacgaagataaatactcaatgctcccggaggggacatggcgataaaagatatatttgagaaactcaattcgatagaaattgatttctctggaatatcccactggctggcaaaatacacattcaggtattccagaataagtttatatgaagatttatctggaatgttaaatgatggcataaatgtaaagcgtgctcttacacacctgattgatgtagaaacagactacgggaagaaaacggggtcttctgcaacctactatatttgttgtgagtgccttaatgcactgaataacacaggggctatatcttcagcattaaaaaaatatataaaggaggatgaatatcaattaatatccagcggtgaaattcgcggcgaccttgccggaggattagttcaggccataaaaattgtcagaagtcgttctgaaatgacaatgactcttgttatgtcgatgatttatccatccgtactggtttttggttgtctggcaaacatgtatatggtccacgataccataacacctgttttcctttctctcgcaccgaaagaacgctggacaagttctatgcgattactgacagatacgtctggtttcctgatagaaaacggaacgtatattctctgcttctgcatcgtactgtttttcctgatcagatattcgcttgcgcgttatacaggaccgggccgtcagtatcttgattacattcccccctggtcactttataaaacatttaatggtgtaagttttctcttcaacatggcctccatgttaagtattgatattcccgttgcaaaagcactggaaaggctggagaaaaacagcactcaaaacagatggctactcgaacgaataaaagaaatcaggagatatgttttacttggacagtcacttgcaatggcaatgaaaagttgcggttatgacttcccatcgaaattatgcattaacaaactattacttcattctgaaaatgctgacaatgcattgatgatgtctaactatgctgataaatggctggaggaagcaaaaggaaaagtcaaatcaacaggagtctggataactgtagtatccgcattaattgttttcgcatttattgtaatgatgattactgctctctacgatgtcagtaacgtcctgcaacactaatccctaatatttttaacctctcaataaataaggaattatttattatgtcttctattaatattttaaatatgcgttctgttttttgtgtaggctggagctgcttcgaagttcctatactttctagagaataggaacttcggaataggaacttcatttaaatggcgcgccttacgccccgccctgccactcatcgcagtactgttgtattcattaagcatctgccgacatggaagccatcacaaacggcatgatgaacctgaatcgccagcggcatcagcaccttgtcgccttgcgtataatatttgcccatggtgaaaacgggggcgaagaagttgtccatattggccacgtttaaatcaaaactggtgaaactcacccagggattggctgagacgaaaaacatattctcaataaaccctttagggaaataggccaggttttcaccgtaacacgccacatcttgcgaatatatgtgtagaaactgccggaaatcgtcgtggtattcactccagagcgatgaaaacgtttcagtttgctcatggaaaacggtgtaacaagggtgaacactatcccatatcaccagctcaccgtctttcattgccatacgtaattccggatgagcattcatcaggcgggcaagaatgtgaataaaggccggataaaacttgtgcttatttttctttacggtctttaaaaaggccgtaatatccagctgaacggtctggttataggtacattgagcaactgactgaaatgcctcaaaatgttctttacgatgccattgggatatatcaacggtggtatatccagtgatttttttctccattttagcttccttagctcctgaaaatctcgacaactcaaaaaatacgcccggtagtgatcttatttcattatggtgaaagttggaacctcttacgtgccgatcaacgtctcattttcgccaaaagttggcccagggcttcccggtatcaacagggacaccaggatttatttattctgcgaagtgatcttccgtcacaggtaggcgcgccgaagttcctatactttctagagaataggaacttcggaataggaactaaggaggatattcatatggaccatggctaattcccatatctgacagcaatacgctgaccttcagcactgattcctgatttttcatgtgcatcggataagcgccttcgggcgcttattttttccatgtttacaggaggagtattgtgcgttctgttctttatatcctgctatcatgtatttcatcattaatcttttcattgcaacccgcatattcagcgacaacgacccaatttgatgcctgctttgcacaagccgggcaacgttatctgattgatcccctgcttctgaaaagcattgccactgtagaaagttcactcataccagaccggataaatcacaacaaagaaaaaggaaaaatattaagcaccgattacggactgatgcaaattaattcatcacacatccccaacctgaaaaaacttggcgtaataaaagacaaatcagagcttattgataacccctgtctcaatatacaaattggcgcgtggattctggcaacacattttcagaaatgtggcataaactggagttgtcttggcagttataacgctggtttcaaagaaagtaacgaacagaaaagaatcaaatacgcacgctatgtctacaataaatacatggtaaggtaacttatgctaaacagcatatttaatacggcgatactttgctgtgcaaatatcgtctgtcaatgctacgcctacaatgaagtaaaattccgtttaaataaacttaatgtatcttataaaaccggcacagagaaatattactgtctgatactgacaacgcttgccgttctgtatctttcattaaaccagctatcactgattcaatctataatagtgattgttttctatgctttccttacattaatggcttgtatagaccttctttcatttctactaccacgcctttataccgtgacatttatcttctctggcctgttatatcagacatggaataacaatatattgtctggtttgttttgtgcaatgctgatgttcttcattatgctgtttgtaagactttactttgcatataaaaacggaacggaaagtttcggcatgggagatgtgctacttattgcaggaactggcgtatggtttccaacgcctgagattgcctgttcaattgtatttattgccgttatcggcggaattattttcttcactcttggcggattaaacaagcaaaaaaaatatatcccattcggtccgttcctttgtggcggaatgtttgtttactcactcgtaccgggaatattattctgaggattaagagcaatgaaaaagacagataaaggtgtatctcttcttgaggtattacttgtcatcggcataatggtgatggttatccctaaagtttatgaaaacattgaaaaccatctgaataatgttcgctggcagaatgcagcagaacacgcaaatacctataacaccgctgttcgtaattatgttgctgacaatgcatcaacactacttgctggctctttacccaaaacaatcacgccagcaacactcattcagaaaggctatctgaaatctggtttttctgaatccaattttggacaaagctacattaccggtattgcaaagaacagcaaaacatcccgtctggaagccctgacctgtagtaatggcggtcagtccctgtcagaagccggaatgcgctcggtagcaagcatgattgaagggcttggcggctacatcaacagcagcaagcaggcgattggcgcgggtggcggctggtctgacacgccttcaaattacgggctgaactgcgcgaccgggcatattgcaatggcacttgttggcgctgatttgcaggaaagcgaccgtttgtatcgttactccataaccaatcgtcccgaccttaacaggatgcatacggcgattgatatgaacagcaacaatctgaacaacgtcggcactttaaacggcaacgccgccgcgctctccggcgatatcagcgcacgtaacggtacgttctctggcgcaatttcaggaaatacagccacaaccaacggcgatatcacttcgaataatggctggctggtcacaaaaaacagcaaaggctggatgaacagtacctatggtggcggctggtatatgtccgattcgtcctggttgcgcagcgtgaataataaagggatttatactggcggccaggtaaaaggtggaactgtacgcgctgatggacgcctctatacaggcgagtatttacagcttgaaaaaacagcaacggctggcgcttcctgctcccctaacgggcttgtaggccgcgacagtacaggggcgatactttcgtgccaatccggtcggtggtctggtggcaataaagtgaactactccgcctgtaagtggtatcaatcatctgtagcaatgaatcacttcattggcgggaaaagtggaggatctatctactacaaacccattcaatgcccgaccggatttatcatgacaggtacacgcatgtatggcattggtgatggcgttgatgaggaacacgttgatgcttattgttgccccttcggttaaatcccagcaccaggaagattcaggcatgtaacagtaattgtgccgccggactcataatttccccacgcataattattcacataccaaaccttgttttggtcggagtatacctgctgaaacccaccaaaaggcgcaccattaaggtatgtccacgaacagtacgcatgtacgccaatgctcagatttcgggtgtttttcccgatattgtacgtactggtagtgaagttcacttttgccgttgtccagataccggattggcactggcccccgtgccaatccggtacgtggagaagggcatcaggtagcactgttctgacaggaaaaatagcaaatggacaacagatcccattgccatctggtttttctgccagccagtgtacctggagtgtcagtaatgcagaaaatccgcacgggtggaagccgaattattttgcggggtcagttgcaacctatgatgccaatcgaattgtgaaatgcggcttctatgacgaatacaacttttatggcggtactcaccgaactgacctgtcggggaaatgtagttacatcgtggtttgccagtgataagtatcgtcactggcaaatggcgtaaactgtaattgaaccattttgatcttcggtcgtgtcgcaactggcagtccatgcattgttgcctgaaggcatggaacgcgtgagccatataaatccggtatttgatctgcattgaccgcctccaccaatgactttcttgccagatggacatgttgccgttgctccaggccaacgccacgcagtagctgaagcggtaacaatttggctatcacctgcgccaatttttttccacgtaccggattggcacggaggccagtgccaatccggtgtgtggagggcattaggtggaaagctcaaggttactcaactttccagcactggttacttggggcaatttgacttttgtgccattgccagaatgggaaatgctgaggattctcattactgccaggtagtcgagagtccatctggttcacgaaaatggtacaaatacgagcacaagacaggttgtattgcgtcctgtgtaactctcaattaagtttggtatccaaaaactgaaaatacccctgagccacaagagtagttttgggccggataagaggtgatctgataagttgcgccagcagggacagcaaaagagatgaatgctgtcttcccataagatgggttgttgctcgcatttgtgctaatcaatacccctgcaacgtatccctgcaatctggatgtgttagcgcaatctcccccggcggaaccaccattccctccagaggcgtaaacaaacagcgtaccacttcctgtattgcgaccagtaaatgatcctctgtgtgagccaagattactgtaactaccgttagaggaaccggaagttctccacacaccggattggcacggtgatattgcatttcgaagcaagaatctctaccttccccccttttttgtctggaggggatatgtttcagaaaatcaaaattcgcaaaatgacaatcagccgggcgctggacaaatacctgaagacagtatccatccacaaaaaaggccatctacaggagttttatcgcgtaaatgtgattaaacgtcaccctattgctgaacgctatatggatgacattaccactgttgatattgccaattatcgggatcaacggttggcgcaaattaacccacgaacggggcgtcaaataaccggaaacaccgtccgtcttgaacttgccctgttgtcatcattattcaatatcgcccgtgtggaatggggaacatgccgcatgaatcctgtcgaactggtcagaaaacccaaaatcagtagcgggcgcgatcgtcgcctgacttcaggagaagaacgccgactttcgcggtatttcaaagaaaaaaatcaggctctttacgtcatttttcatctggcgctggaaacagcaatgcgacaaggtgaaatcttgtcattgcgttgggaacacgtcgatctgcaacatggggtagctcatcttccaacaaccaaaaacggtgctccacgcgatgttccgctatccaggaaagcccgtaattacctgcaaatgctgccgacacagcttaacggtaatattttttcttatacctcttcgggattcaaaagtgcctggcgaacagcacttcaggaactgaagatagaaaacttgcattttcatgacctccgtcatgaggctatcagccgatttttcgaacttggtacattgaacgtcattgaggttgccgctatttcaggccatcgctccctgaacatgttgaaacgatacacacaccttcgggcttatcaacttgtcagtaaactcgatgcccgacgcaagcaaaccagcaaaatcgctccctattttgttccctacccggcaacggtcgagaacagaaacgggcaagtcgttgtgactctgagtgatttcgacctggaaacaagcgcagccacaaaagaacaggccatatttcatgccagcgtgttgctgctacgaacactggcacaagccgcccagcgaggagaacgcgtccctactcctggcgaacttcctacaaacattgatgaacgggtaatgatttgtccattaacaaattagaggattcacttatgatagaacaactacagagtgattttttattctggatatttatttacttcctgatagtaggtttgcttatcagaaacattcatcttaccagaaaaattaaatccatcgaaaaaaacaaaatgttcccagcggaggaatatgctgtcctggacattgaacagcatatgtccaataaatatattgggcggctagtaacccgttttatgaagagaactaatggtgcacctttgttaattgtgtttccagaatacgataaaggagacaacaatgaagacaaaaattctccaccattccaacttgtaaaactaacatccaacatcaacaatattaaagaaatttattccaatgatgacttaaactgttttctgaataatatttcggcacaaaaaaatttatatacaacgcactctggacctagccaggcatggattgaacatgcatatcctttgcaacaagtaactattctcttacaaggcactcgtcatagtgaaagggaagatataatcagtcaacttgagattattctttccagactaaaaaatggagaaaatacaggttttgagcatgacgatgattttggatattcatttcagtatgatgccgcagcagtaggaaaatcatcatttttcgatgaagcggcaggaagaaaataagaataacgctctatccattgcacagacaaattaacgttaatcttttatgaaaatcttattaacaatatttatttatctgcttaccgcttttcagtctgcaaatgcaggtggaataccttatacatttaaccagaaaattcttcaggggaaagttattcgcgttctcgatggcgacaccatagaaattaaaacactacccgcaaaaattgttgtgtatgaagttccgatccgagtccgattgataaacatcgatgcccctgaaaagaaacaaccttttggacgctggtcaactagtcagcttaaaactctggttgcaggtaaacaggtgacagtctcttattcacataaagaccgctacggacgcattatcggtcatgtgttcacgacgaacggcacggatgccagccgctttatggttcagtctggcgctgcatgggtatatgaacgttacaacgtggatgagtcattaccggctctgcaacgggaagcgcaggaacaaaaacgtggtttgtgggccgatgcaaatccggttccaccgtgggaatggcgtatcagaaattaagggggcaagaaaatgcattcttcttttggtttgccatgattctgtctttttatctttgtgcaatattaaaggcttctttttaacagggggcggcatgtatgtaattaatcaacagacaagggacaataatattcttacgttgcatgatgtttttaaaatctatcaaaatacaggggggcttcgtcttgtaaaaacagaggagaatgaaaagtacatctccattatcatttgtggcgtttttcgtattagaaaaaacaaaaagaataacaaaatcactttgtggggatacaagctaagagataagcacactggggtatggaccagaagaaattcatttcctggtaagatttttttattctggtctaaaaaatctgcatacgacatggacgactggttaaaatatgcgattagctacatcatcaaatcattgattgaggctggatattcaattgaagacaaactctatttgttacgcattggagaggaagaggaaaacagcgagagtcgttatatttccacactatatccatccaatgtatattactcatatgagtatggaatacatgacattgttcattgccttggtaaaatagcatcattcaactacccctataatacacgatatatcagcagacatattttactcgcagagataaaaaacaaaatttatcagagagcattaaaaattataggggtggataatgaatttaatgcttcaaaagcattgagtaaagctatatggataatggtagataaaaagatatttgcacaatatgccagagcttcacattgttcgatagcttacaattcaattcgtcaggcattatttgaggactatctggatttttcaaagcgaatccatattgtgaatgatatggattttttcggattgtggcctatggttggtcgtctaagacaacaacataaaaatggtcagtttatactatctggaaagacaaaagagttatatgaaaaaatcagttttccctgcaaacttagttatggtgagttcagaagtttacgacatgttagtttgtcattagtatatgctttaaatgataaacatgataatgcatcattcagatttacagtcagattattacgccatccacttatcaagaactatcctgtgagagcaatttactggattatcgattatattagcattcgagcttactcagaaaaagaaaatgatatttatcgtatatgctcaaaatggctagaatatcatcgtgatttatttaaaaacattggcttttatgaccgtaatactgaatccaggcaaacatcacgctgggaaatggaaacgaatcagttgtgtcatgcaattgactggttgttagcagaagaacggttaattcataaaaaccaggagtggccttctttctggagactatctgatgaatggacgcgacaagtgaagaataacgttattcccgtaatcccaaaatggaaaggaactgggataaactggcagaaagttgataacggtgtaaatgaattaattacatttgatgctctgtgtcaggaaggtcaggagatggaacattgcgttgccagttatgcagactggtgtgcatctggagaatatattgcaatttcagtcctgatggataatgaaagagccactcttggactttcacgaaaagaacatgatttaacctatcagtttgaccagatgagaggtattcgtaatcaggctgtttccagaaacatgctaattaaaggcaggcatattttaaaaataatcaactcatcactaaaaagataatgagtcatcgcatctcattacagcaccgatgactgggtgtttattctttctgaatacaaaaactgactgaaagataaggaaagaaagttttcttacctgtttgtcttacgcaatggtgaactggttcaccatgaggtcaacaaatcagagcttctttgagaggtttaacatgcaatatgcattgcttgatggatttgaacgaaagtttttgctggatgctcttgaattcggtgttctgaaggactggaaagaaaatccggtaaaagaacttcctgatattgatgaatctgctcaccccttccatgtctgttatggtggatatttattaaatcctggtgtttcagattcagatattagcagaaaaataaaagaccagacaggattctggctggcagctattgatgatacccgcatggattgtcattcaatagcttattatgatattcacacactccctctgatttcgtgtggtcatcaaaagatagttccttttgccgcgttaataaaagctgatgaatgcatcatttcaaaaatttcttcgtattctggttttgccgtaacagcctttttgagaattaaagaccaggatattgcaactaatatacttaaccgtgaggggatttttgcttttaatggctgtgaacgcagattcagacatccagtaagtgaagataactggcaacaggcagtatcagaagaacgtgctatccgttgtgccaaaagattaattcaatgtaaaggataacaaaatgaaactttttatcgcagaaaaacccgcagtagcgaatgatattgttaaggcgcttggtggcaattttacccgtcatgatggctggtttgaaagtgataatactattgtgactaactgttttggtcatattatcgaatcacagccccccgaaaactataatcctgaatacaaagagtggaagattgaaacactccctttgcgtctttatcccgtaaaataccagcctgtagaaagcgccgaaaaacaggttaaaacgattattgagcttatcaggcgtgctgatgtgaccgaaattattcatgctggcgatcctgatgacgaaggacagctacttgtcgatgaggtcctggaatatgcaggcaacacaaaacccgttaagcgcgttctgatcaacgacaacacccttccggctgtgaaaaaggcgctggcaaatcccaaaaataaccgtgacttcagaggactctatctcaaggctctggcgcgttctgtagccgacgcgatatacggtttatccatgacgcgtgcttacacaatcccggcaaaaactaaaggctataaaggtgttttgtctgtcggacgggtccagacacccgtgcttggcctgattgtaaatcgcacccgtgccaataaaaatcataaatccagcttctactacaccatgaccggacattttcaacgcggcgctgatgttatcagggcgaactggaaacctggtgagttcgcaccgctgacagaccgcaaattgcttgataaaacctgggcgaatggaacagcaacatcacttgcaggaaaaccagccacagttgaagcggcagcaacagatgataaaaaaacggctgcaccgttgccctttaacctggtacgacttcagcagtacatgaacaaaaaattcaaaatgactgctcaaaaaacgctggatatcacacagcagctacgcgaaaaatacaaagcaattacttacaaccgttcagattgttcatatctttcagacgaacaattcagtgaagcaccacaaataatcgatgccctgaagtcggtgtttgatcagccaatggatattgatacgacacgtaaaagcaaggcatttaacagcgcaaaagtaacagcgcatacagccatcatcccaaccgttagcgtaccggacgtaaacgcactgagcaccgacgaacgcaacgtttacctggcaattgcacaacactatcttgtccagttcatgcctgaaaaggcatatcaggaagtatccgtcgccattcagtgtggtgatgagtcgttttatgcccgtgccaggaaaactacagacagcggatttgaagcgtttcttggtgtggaaaatgccggggacgatgaagcagaagtcgaaaatgatgattccgcttttgatcttctctgtaaaattcgcacaggagaaacagtgacgacaaaagaagtggttgtgaatgagaagaaaacaacgccaccgccattattcaccgaagccactttacttgccgcgcttgttcgtgtcgcagattttgtcactgatccagtgattaaaaagttactgaaggataaagatcgggataaaaaagacgaacatggcggtattggtacgccagctacgcgggcttccatattggaaacactgaaaaaacggaactatatcaccctggaaaaaggaaaacttattccgacagataccgggtatgcgcttattgatgctctgccggatatagctgttaatccagatatgacggcattatgggcggaaaaacagacactcattgaaaacggagaaatgaccatcgaacagttcgttgacgaactgtacaatgatctgataccgatgatcagtaatgcgaacagtgctgaaataaaagtttcccccagcgcgccgtctggtcagtcacaacgcctgtcctctccttgtccttcctgtggtaaacagattgttatcaggccaaaaagctattcctgtacaggatgtgaatttaagatatggaaagatttctgcggcaaatcattaaccgataaacaaattgaaacgttaataacaaaaggagttacaagtgaattgaaaggtttcattagtcaaaaaacaaacaaagaattttcagcaaaagtaaaactggttgacaaagcaaccgggaaactgggatttgagtttacacaaaaaagtaagaaataaatccagcagtagaaatcaaacatcgttgtagctactataggacaaggatgttcttcaggaattgtacaatgaaaacaaaacaagactggctctttcagttaagacgttgctcaacactcgacacacttgaaaagattattgaaaaaaaccaaaacagcctccccccttctgagcttgagtcgtttaatgccgccgccgatcacaggcttgcggaactcacaatgaataaactctacgataaagtccctccatccgtctggaaatatgtatattagttttcatctattaatattagatgtttgatcgacacaaacatcagcaatccctatacacctttcatagaatgaattgaaccctgtatatagcctgtctgaaatggatatctggcaggctatcttaatagtgttataggtggtatgaatgtttttcctctacgagacctacaatttcttctactacctgataaagttaattgtcattcagccacaatatatttgtgtctatatgatattcttttttttcaatgcagggatagcatatagcatcaccaatgatatcgaggatcaagtatgtcgatggcttttattcgtaagtatgttacatgctctgatgattccccccgcagttatcatgccacttatcatgccaccacaggaaatacttcaggaaacagagaaaaggcaggaactacatgaatcaatacccaaaacatgcaaattaaaggcactggatgctcaacaaggtggtttattcggcgttgataaagatgaatgggtattccctgacaataaatcattctatctgcctgaaaagtaccgtccagaaaacaggattacggaactagccatgatgaaagaaggataaagacctatgaagatattcaaattgtttgttctttgtatcccccttctgtttagtctttttttcgctggctacggcattttgtcaaaaaatccatttgaaacactaccgtgtctgtccgccagtgctttttgcctttttctgtttgacatactgaggcgatcatttatgaagtgaggtgtcttgatgttaacgttgaggttgagaaagttttgttggttcttataattatagaccggattaaatcatgaaagaatacgaaaaaacggctttaatatattccttaaaggaaagcaatacattagttcttcggattatactaatctctattttagttgtcggggtgatttcaggcgcgatatacttatataacttggcgatctcgttgtttgattcaaacccaacgtctgtgcaattcaccttttgcggagtaggctgttttattgctctattacttcaatggatatctaatgttgatgcaaattacagagaaagaattggggagcaaccaagtacaataaaaaacattgtacaatatttatttgcagccattattaccattagtttcattacaatggcattaacagccatattagtcttaaaagactcgtccaacatatggctcaacattacttttattgcattattactgtccatttttgtagctattatttctgtttggggttgactttttttcttaaaaagcccgaaaaccgggcttttttcttaattagtgcatgtcctgtgaatcgtcacgctgctgctgcgattcctgatgatcttctctggcctggacaaattgttttccaagagcatcttctgccatttcacgagtgaatccgtgattaagcaaatcggattcggccttctccctttcgaacttcagtccttcccctctgaacttgtcctcaaagcgatcaattgcctcaagaatcttgccgtcttccggcgtgcaatcccgtccctgtgctttctcaatttcatgacgctccacgcgttcagcatttttcattacagcgtcaatcccctgagaaatatgttcagactcgacgcgataaatgacagtatcgcgcttattgagatcatgtagctcgcattcaacccggccccactcaatagcatccttgagagagctgaaatcttttatttcagcattcagaccttcatgtgttgagaaatagacataatccttctgttgttccagtttattcacattttcaatagcccttgtactgaaatggatacctgtaattaccggaacacgagccgatgtttggtcccccgttaaaacttcagaaggtgtttttccagtgatcgcggcaaattgctgctccgtaacatccactctggcaactgcatcaccacgctctaagccatgcttaccagcgaccgcaaggcgataaagaccaccttcccccctggtaatttccgcctccacaacgatatccccattgcaggaactgaactgagaacggtctttaaccaggaagttttcaagcccggagatcatatgctcgttagctgaaatactggcgagtatctcttctggtgattctctggacgaatcccccgcctgttccatcactgccatattagcgtcattaacagcgtccttaattcctttaaaggcgatttcttctcttgttacaggtgtgattaagatatcatcctggttaagcccgtgctcctgaagcatcttatttttatattcagatgcgtcgtgcaatgactcaaaagtcttaatatcttcactaaactcatccttcgaaaaagaaaccgcatacactggagtacggtattcttcatatgaattggcaattatttcaaatggcctatcaaacgttactaatgccccctctggataagaggataattcatcggttgagacagttttagacataagcacaacagtatcaaaaccatcaccatttaaataattgctttcatatttttctattgcagaagatttgctttcctcataacactgaatagccgcatctttagaatgaaagacgataccttcattcaaatcatggaagcgactaaagtttatacaataaatttcctgtttattatgcacctgcgcagtagcctgatcgtgttgagtagtaagctgctcctgaatcagagcctgtgttctgtcaatacctaactcattcacaattttgcaaaattcttttgcgtcgttttcattatcaaaactggcaacgtcaaaaatatcatcgctgtctccaggtacatgtcccagcacttcccaaatctcattttcatcgctatccagagatttcaaatagccaaattcaccatttgtgcctttactaagcatctgtgaatccagggtgtttgccctggtaataacaccaggatcatatgaagatgtggcctgctctgcgacctgtgcttgctccgcgacctgtgctttctccgcgacctgtgcttgctccgcgacttgtgcttgctcggtggcctgtgcttgctctgtggtctgtgcctgttcggtggcctgttccttcaatgcatcacctttctctattctggattcggactcctggctattttcctgtgtttccacctgctcaaacttattaccctgaagttctgcttttaattccagcatcatctgttgatactgctccgggcgtaaaataatcttcatgtcctgctctgcggcaacttcagcgcacatttttttgaaatcttcagagccggtaagtttgagtacaccaccaaacttttccctggaatactcaagcattattccgatctcttcttttgagggatttttacccgcaacgacaaagttccctttgtcggtaaagacaggcttttccgattcctgatcgcgataaacaatcctggaatcctgcttatccatcacaagatcttttagtttggtgttaacctttttcgcctcttctaagcggcgctgggaatccaccgctttctgaagcgaaagttcgggttcgtcagcagaaatggcgttgatttcatcgaagttgagatagcttttgagacgttcaagggctttcatttcatctttatccttatgccagtcagcatgatattgacgaataatgtgtcgcccatctgtgtcgagttcagaaagacgctcaagtgtggttagttttttgtaaacaatcacacccacggcaatatcacgctgttcacgtggtattaacttcaactcgcgtctcatctctcgcagatcattatacagcttgccacgctcaaacctgatagtatttcgtaatgttttttcagataaattcagtgagttaagacgctcacgagcttcatgatgcgtaaggcgtctgtaggttggatagcgcgtatatggcgtgttttctaactgctgtgaataaacttcaagcagaaaggatttcgcatctttccaggcaagattaatatgctttgtcagaaaatcagatgcgttcatattacgattccccacagaaaaccggggggaaccgtcctttgctgttctgattttatgctgcgctggaataatattaaaacgctcggcggcagaagacagaaacctgacaggatcaatatttctgcgaatttctgccatcgttgtaatttcgtttttctctgccgcctcattcagagtctgaaacatcgtttcacacaaaaaagaagagcgttcaagactttttattcctgactctgtgaattgtctatcataatcccgtcgcacatcctgaccaggatgttctctttgcggtaattgctctgccagatcacgctgcgaaatatctgacaatacactgatagagtcgggtcttgtgaatccattgattccgtaaaccataccgcgttggggcatacgtgacaatccgactgttgcttcagattgacggattctggcaaactttttaggacacgacttgtaacctcccgctcgtcctgacgtttgctgagaatttctttcgttaagtttttctcttgagtcatattcttttatcctctctttcagaaattcaatctgctctgcttcagataaacttgtatagtccttacgaacgctggcgttgagaaaaacatgtttaatctcgtgactggttttgtttacccaggtattgagacgtttttctatttgcttaggcgtaggtttttgaagagtcaactttccctcttcaatatagtttttacgaaacaacgggcttttcagattagtgaactttttatctcccggtaacttaacagcaatatattcactggcctttccttcatttcttatcctaacctcaccatattctgcaacaatctgtttgaatacagcataatcacttactttttctttttcaattcgataattcaattcattcttaaatgcagaattacgctctacatcaagatctgcttttactctctttaaaataacactataatcactattttttctcggaaagtccttcgggctggcaagattatatttattgttaatatgctcctgtattgcatctagctgttcgatagtatgacctttccctataaggccaacaggatcaagtttatctcctgtaactagattaacctttggaatgacaatatgaatatgaggctttctttcaattaactctcctgtactattatcctgaatatgccggatttttggcaaatgtgcttcagcatagaaagaatattcttcaggatgataagcattcatcaataattttttataatcatccacaaccgcctttaacatttcatttgatacgtgactttcatgaaaagacaacgtaatgtgcaaataacggtcctgtttgttgtcttcaatagaattgataatcttatctgtagtctggagatcaccatcaagaacaacacgatgatcaagttcatcacgtgtgtactgacgttctgctttgcgaccatttatcaggtaatcaacaataccgtcattaccaccaccatatctgacaatcatttggctatctcctgaaggcgatcacgaataccaatcagcacatttaaaatctttttataaagcgcctctgatataataccctttaaatgatctgagtttaagcggtgagctatctggttaatattattcccagcccaacttaactgagaaagacaccgtttgtattccgggatatggcgtttatctgatgtgtagttttttattttaccaatagtaagcagcctgaaaaattcagacttactaatttcaagctctctgattgctctgtcaaatggagcatactcttcttctgtaagtctgaatgtcacatgaacacttttgttggcttttttcttcataagtcctcaaggttcgtagaaccgcactagaacggctgcgccgttcggggttgcaaaggggcgtcccctttggcacaagcattgtaacatgcccggaacgggcttgtgtacaaagcttatcgtgcctgtgttttagaaggacaaaaaaatgccgtgcatacagcccacacaatgactcacataatcacccacaactcaaaacacacagcccacacaatcacccacactttaacccacaaaaaagaccacaaccccattgacaacccacaaaacaacccacataatcacccacacaaacggcgagcaaattgctttaaataaggtattatgccaatgtaggaggtagagagagagaggaaatgtaacaaatgaaaaagatcgagagtttattatctccaatatgcgaggctataaacgaaacaaaatcgaaatcaaaacaggctgtcttcaatatgtatttgcaaaatatacttgaagcaaagaaatattatacatgggagcaaatagctgattacataaacaacaacaccaagacagaactagcccaaaagacttatataaatatgacagagagggctaaaaaaagacaaaaatgcactgaaccaaaagaacaggcaaaaaccatagatgtaattgttcagaatgaagctaaaggcgatgaaccgagagggggggtaaaaggttttttttcaaacattagtgagaacaaaaaagaaatagagcacgatccaagtgctacgaatgaaaaatttataaataaatatctttaagtaaaggagcattataaatgaaaaactcaatcaatttcatccttcagggtaaaggtggtgttggaaaatcattcgcgaccgcaatactggcacaatactttattgatgaaaatcacatggataatatcgtagtcggtgacacagacccggttaatacaactacggttaaagtaaaaagattaaatgcagatttgatacaaatcactgaaaacagcaaagtaatacaatccaaattcgatccaatgttcgaatcgatgctgaccaatagtcagaatacttttgttattgacaatggcgcatctacatttttaccgttaattcagtatttcaatgataactgtgttatggacatgtttgaagatgtagaacaagacgtttatatccatactgttatcgttggtggacaagctcttgcggataccttgcagggatttgaagaactgaaagaactggttaaaggaagtaaggtaaaacttattgtctggataaatgaatttcagggtattccagcacttgaaaatatcccattaatagaaactaaattcattgaaaaaaacaaggatgtaatcgctggcgttgtggttattcaggacagaaaaagtgatgcctttgcctctgacatcaaagagctaacagaaaaatcactaacactgaaagaagctcttgagtccgaccattttggattaatggctaaatcacgattaaaacgagtcttcaatgacatttacaaacaattagatagcatctatgacgatgaatacggtgaataatatgagtacagttaatcagccagaattaaaacagcctgaaaaggctgtttccagtgaagatattgataattttattgttgatgtattcaaggagacagggcataaaatatcaaaagatgatccagttatttcattaatttttctgaaccaaaagatacaggaaaaattcagcaatgagttacaagctaacttcacagccctgtctgagggcttcagacaggtcgtttcatctgtagaaaatgactatattcaaagattcaagaatattgttgagacgtgcggcgatctggataatgaaataaaagaaaaagtagaagagggaaaaaacgatctaaaagaaacaagtgttgaggtaaaagaaaaattaacagatgatattattgaactcatatctggaattaaacgcaaccaggaaaaaaacaacaaattatatgaagaaaagttgaagtcattatctaaggctgtaaaacccttcagtacaagaacagccattgcaatttgtgccttgtgcacattatgcctgtctgcggcattttctggcgcaacctggtatgttgcacaacatgaaaaagaggcaagcctgcgcttctatgcaagagcttttcttgatatgaaaaaaataactgaagagagcatgagaaaattaccaaaatcagaccagcaaaatataaaactcaaactagacgaaattgattcaagaaaaccatagatatgaaaaggagtcactaatgacaacttttaccgacgacgacaagaaactaattaaagaaatcagggagcgaatcggcagcctggacgtgcgagacaatattgagcgtcgggcttatgaaatttctctggcatcgctggaagcagagccagttatgttctgtatatcaggacaaaatgtagattcagaagaacatgtatcaaccagcaaagcggttgttgatgcctgggttgaagaatggaatcaggttgacggaagtcctggcgaaccactgtacaaaactatgccactctactgtcacgctgccttgccagcgccggtagtgcctgaaggactggttaaagcggtgcgtttttatgagcaggtaaaaaatgagaatccgccagttgggactggtgcgtggaaagacgctgttgactgggtgctcgaagaggcttgccaggctgtaaatacagacatcaaaggatgaacgatatggcaaccaacaatcgtaaagccaagatgctaatttcccgtgtatacagactttgctaccccagccagtggttgagagttagcaatcgccgtgtggtgttgttctcattttctggaattgccagagagggaatcaaagataagcgcagcgcggcgcaaaaccgctggaaaaacaacttgcgcactaaaggagcctaatatggctattgccgcaagttacaccatgcatctctactgtgattgtcgccagtgtacaaatggtaaatatcagtcgccagacttcggtgagtatatcggtacgtcatgggctggctgtgcaaaagaagcacgtaaagatggatggcgaataagcgccgacaaaacacgtgcttttgcgcccggacataaagttttgaggattaacaaatgacaacatttaccgacgacgacaagaaactaattaaagaaatcagggagcgaatcggcagcctggacgtgcgagacaatattgagcgccgggcttatgaaattgctctggcatcactggaagcagaagcgccaaatttgcctggtggtttcacaattgaagaagcaaaagaattacacgaaaatctggtaaaaagtcacgtaagcaaggctttaagtggcgaaaaaatgaaaaaagaaaatcgtgatgccgatttgcgctggattcatggcgtaatagttcaggccgcgtggtttgtgaaagcatcactagggcagaatgcatagtgcgtacctgcttttctcctggcaacggtggatcttccgcttcctcgtcactcgctcgctatgctcggtcgctggactgcggcgagcggttagctatcaaaaaaaatccccgcacaacgcggggatagttttatttatatgcaagttcatgacgtgccgcctgagccagaaaatggctacgatctttgtatacgccgccactttctctcacatatccatcaatacgacgaatcaatacatcaggcaatgaaatattaatacgttgttgtttgccctcaatttctgacaaatcaacatcaattacaaaccagctatcacagtggttataatttgggttggcggaataagtcaaacacccttcatcatgaatatcatcaacagaatgagcaccgcttattaccatctcttccacgattgctaatatcgcttcacgcgccattgcgggtatttctgcctgagaatcagcagcagaaacacatccaaaatcaaagcaatcaaaaaccggaacggtgataccgtatgctgtatgatcatctttcggtgtttcgacaccaacagaaaagaacatggctacctccaaagtcggcggggattaaatccccgccatttttttgatcgatctgacagtacctagcggcaagtcctttttaggatgaggaacaggaaaagtttttcctgttattggcgaccaccatatctggtgactgcttgccttatgccgtttcaactcgcaaccagcagctatcagttctttcaacaggtcagcagatttcatatgtcctccctaacctgaaaacaattatacacacgcatacacacaaaagcaaattatttcattcgtatgacttatgaaacacactgtaaagacagttcaatctttacagtgtaaatcatttatccagttttatcgctatgcatgtgatacatagaaaatcatatagtgttttactatatgatacctgattgacacttttaactgcacatctcatcatttacatcgtaaagacaaacatagctttacaatgtaaagctatataattaaacactccgtgtccctgataaggaaaaaaaatggctcaaccaaccccagaaaagatactggcaatcatagatgatcatgatcgcgcacaaaaaaaacaacgcaacaaaaacgtcttcatttatttatgtctctgcttggcaattattggagtggtcgcgcattcctttatatcaacgtttcgtcttgatggtgtagccgtccttacaattcttttgggcgtgtcagcaatcgcattttttctacattatgtagaatcagggaaaggccagattcttagcagtgaccgcatattgtccatactcgctcaaaccaaagattaccccacaattcgacgtaaagttgttaatcgcttgctctccggttcaaaactcacgggtaaagatgaagagtacatattcagtgaactgaaaaaggctgaacaaagcaacgaacgtgaaaagagattgcaagcaattaaagagtatacatcgtaatacaacgtaaagcatcacttgtaaatacaacacactacatcgtaataccagaaaacaccaacgccagcgagcaacaaaaaggggcgattaagcccctgcgcgatgattaatgacttctttttccagtgcctagctctggatcaagcctgacgttaaacacacctttaaagggcgcgtcaggctcctttccgtcctccacacaggactgtaaatacaaatcaaccgatgttttaaattcccgttccaggtcagctaatgtttctgcctcaaaagtcaccagatctcgaataaatgccagctttccatgcaggatattattttcaaaatccggctcaactgtacctaaatatcctttatattttaaatgtttcataaaaccccagcctctttcaagaaaagttatcagatagaagggtgaaagaaaataccagggagcagcgaggccacatacccctaagcgcagcgcaaccgccggaaaacgcaccacactgtaaagacaataaaatctttacaacgtaaagctaactatgtaatacaacgcgctacacattgacatcctccacgccctaaaggacgtggattcctacgacgttcaggctgtcgcctgaatcatttcggtgggttcctgcttcaacgagcggcctgactgcaccatctctccacaggcaagaacggcgtgccccgccgctaaaatgttacgagcgccatttacatcggcgttcgctgtatatccacatacctggcatctgaattgactttgtgacaggcgattttctttcgctgtatgaccacagcacgtgcaacgctggcttgtgtacgctggcggaacagcaagcacctgaccgccacgccagagctgcttgtactcaagctggcggcgcatttcataccagccctgatccagtatcgaacggtttaaacctgattttgcccggacattgcgccccggctggctgaccgtacccgctgctgactttgacatgttgctgaccttcaaatcctcaatgactatcattgcgtggtttttgctgacggtcgttgtgactttgtgaaggtagtccctgcggatatttgcgatacgggaatacagtcgctgtattttgcgtttctgcttctgccagttgttgctgaatttgaccttgcggcttaactgtcgctgaagtctcgccagcgtcttctggtttttctgaaaactgtttacaggatcaaaaatagtgccatctgacagcgtggcgagtttagccacgccagcatccagcccgaccattgatactgaagggtgaaccggagttgatacttcactttctgtctgaatactgatgtaccacttaccgcaggactgactgacagtgacatttttcacaacgcccgtgacctgacggctgttccggtagcgcatccagccaagtttcggcagaaaaatacgactgttttcctgatcgagcttaacgccctgcgggtagcggaatgcatcattctgtccccgctttttgaatcggggaaaagccgcccgcttctggaagaaatttttgtaggcccgctcaaggtctttcagtgactgctgcaatggctgtgatggggcatctttaagccattgggtttcagtggcatttttccactcaaccaaccacgaggccatccttgggtaaggaatatatttgttccctgcctcatggttctcattctgaagcgccagagcacgattgaaaacgaaacgacatgcgcctgcgaagcgcctcatttctcgctcctgttgaccaccgggtcttaactggaatttaaatgcctgtagtcgtttcattcgaccattttaaacaaaaaaagccaggtggaaaacctcgccttatatcctcgccctgaaggacggggttttacggcgcactggataagaaagggagagcattacactctccctatatatgactcaaactaaagcattatcccggttatgcgcccaccaaatgatttcgctaataatccatgcttctatcgcgggtgtttttacaggttccccatttacaatgcggtttgcaagctctatcatttcacatactgacatttgagaatctccaaagatgcatctgtcatttggtaacaggctgccccacagcctgttaccaaccccaaattagtatttgctgattactttaccctccttaatcatttttattagttcctgttcagaatattcttttccgtgttccaatgtggaatatatatcgccaatagtccatactccacactttttaatttctgcatttagccaggattcatgcagaataaacaacggttcgcaatcatttcctttttcataaacataaatagattcggtatcatttccagaatcagaagtaccaacgactttttctatatcgaaatgtttttttagaaaagttgtgaaatgcattttcatgctcctgccgctgagcggctttggtggttggggaccatcccctcccgatgtgtttataataggtcagaactgacctattatcaagtatttttccctccattcttcaaaaaaaacaccatcaaatacatatagttatattcatgtgatgcccgacagggcatggaaggggcgaaagaaaataccagggagcagcggggccacatcgccccgaagcgcggcgcagccgctgacgaacataccaggatgcacagggccatcccttcgccctgcaaagccagaacagaccaacaggccatgatcatgctgatttgcgccgcagaatgccgcagttagcgcgagcgacagcgagtttacgccgtcctggtgcattacagcagggcggggcgctgtactgcgcgtgtgagcgtcagcgagctacgggcgcaattgctcattgttcaatgcaactggggctattaagtccagccataaattcagttatggtttttgtagcttattccgtgatttcgtcatacgttaattctattttcatcttaatattccttaattacttccagaatcagaattctttttattccttttacaaagtacataatcagggtgttctccagctaaaagcagaagaaatttaaactctactggtgtaagtgctgtaccgcttgcagttccgacaggttcttctttgcgacgccaggtacgcggactcatgctaaatatttcggcacattctttctgtgtcaggccaattttttgccgcagacgtttaatgttttctggtgtgttttcatttggcattttttccctcactcatttcctgaatcatcatagaaacaatttctttatcattctctcttaatccgtcgctggcaaagtcgatagtgtcgaatgccttctcatgaaaaacaagatcggcaacagttttcaccgttgctttcgtttttcctaaagtcgcagacttagaaaaagtttttactcgcttcaccagatgaaacgtatcaccttctttattcagataatattgtctgtcaccttttcttatcttcatattgagatagtctccccttttaacagtaaaggggcatatagcccctttcttttaactttttccggtaatcaaatcgacatcttcctgataaagctccccaagaaccggaacaacgccttttttataatcacggatattatggcagtctgtaaaaatgacgacataagcctcgcctgttttttcatgtttaaggcaaattgtgcaaagcgtcacgcgcacaacagaaaacacatgaccagttgtagagacgatagcaggaaaagtagattgtttcatgtttaactcctgccgctgagcggctttggcgattgggggccatcccctctcaatgcattaataataggtcacaaatgacctattatcaagtattttctagacgagctttattgaaaaatcattttcaataaattcatctaacatctttaatataccagctttatttacgaaatcatcctccataatttcgatacttgctgatatttcacatgtaaactcaatgctcctgtcaaatcccgcaatcccagctaatgcagacagcatatgataattatcaatatttatattaccaataagaactttcatttatcctcctgatatggggggaatccccccatattaaaaattacaatctggttgcaagtccggtttgttcattaaataaacattcaagctgatcacaataaatattatcaaattttgatatttcttttactgtagctccacggacacgggaaaatgtcaccaggtatgtatcagagaaggttaatttgattttaaccaaattaattcccttcattgcaaaatttgaaggtaaacgaaagcaaagaccagactcaccattttcatcaaaacaggcaaagttctttgcgcctgtcatagcaataaagcggtttccaccaagctgattaagaatttcagtagcaacaaatttggcgtggttttccatttttaagctcctgccgctgagcggctttggtgattggggaccatcccctctcgatgtgtttataataggtcagaactgacctattatcaagtattttttcctcctttctttaaaataaatatcgttaaatacaaatatttacattcatgcaatgcccggcagggcatagaaggggcgaaagaaaataccagggagcagcggggccacatcgccccgaagcgcggcgcagccgctgacgaacataccaggatgcacagggccatcccttcgccctgcaaagccaggacagaccaacaggccatgataatgctgatttgcgccgcagaatgccgcagttagcgcgagcgccagcgagtttacgccgtcctggtgcattgcagcagggcggggcgctgtactgcgcgtgtgagcgtcagcgagctacgggcgcaacattacattgctgcattcgcctggcattctccacgccttgaaggacggagttttactgcgcaccagataaaaaaaggggcgattaagcccctgtattcactattaacaatttaacatggttgcaggggataccccctgcaactattttcttagtagtatgatgtgaactcgtgtttttcttccggtgatcctttatatgctgtttcgaatgactcaatttcaattgctggcgtactgtaataatcacgcactcgccgttttaatggctcaccacagaaatcattgagtaatggggtcttatatccgctcattgaatgagtccgatgaactgaagcgcgaatctcctggacagttacggtttttttgccatgaacagaaataacctgatagaaattaacgttcgtttgctcatatccccaggaagatacaaacacatcgccaacagaaacagtgccgttattaaaagttaatgttttcatttttatctcctgccgctgagcggctttggtggttggggaccatcccctcccgatgtgtttataataggtcagaactgacctattatcaagtatttttccctccattcttcaaaaaaacaccatcaaatacatatagttacattcatgtgatgcccgacagggcatggaaggggcgaaagaaaataccagggagcagcggggccacatcgccccgaagcgcggcgcagccgctgacgaacataccaggatgcacagggccatcccttcaccctgcaaagcccaacggactgacaggccatgatcatgctgatttgcgccgcagaatgccgcagttagcgcgagcgccagcgagtttacgccgtcctggtgcattgcagcagggcggggcgctgtactgcgcgtgtgagcgtcagcgagctacgggcgcaacaacacaccaggcaaaatcgcatcctgaaaagttaccctgtaacatacacacaatgtaaagcgcaaaaaacaattacattgtaaagacacaaacatctttacaacgtaactataatgaatacaatgtaaagacaaataaacctttacactgtatatccgaggtttctatggggagagcattacttgtcgcatcagataaaggcggtgtaggaaaaagcaccacagcaacaaacctggcttcttatctggtaaataattcacgaacggtcatcattctgaagaccgataaaaacaatgatattcttagctggaacgaaaaaagaaagcagaatggcttattaccggttcctgtttatgaagagtatggcgatgtatcagaagtcattaagcgcctgaaaaaaatatgtgaagtgctgatcattgactgtccagggcatgacagcaaggaatttcgcagtgccttaactgtagctgacattctgcttactctcgttaagccgtcttcagatttcgaagcagaaacgctgactcatgtaacagaaaaagttcgcacagctcaacagatcaatccagacctgcaaccctgggtacttttcacgagaattaacacgacaaaaccacgccacagaaaagcagcgattgatctcgacaagttactccgggagaacccggtgtggatacagccacttcgtacacgtatttcagatttagatatttttgaagcggcctgtaatgaaggcgctggcgttcatgatgtacgtcgcgcatccagcctttctacagctaaagcacaaatagagcttttggcgcaagagttaggcatcaatccctaatggatgtaatacgacagctttacatcattagctttacacagtaaagctaatgtaatacacgaaaggtgatataatggctcttgacttgaaaactccggtaataccaggacaaaaaacagaacaaaccaatgcagacacagcccgattcatcaatgaagctacccgcaaaaaatcgggagcaactaaagtgaccaatgtccggcttggggacgtttacgaagatattctggaacgggaagcactgcgaacaggccagacaaaaacagcaataatgaaagcggctcttgcagcttacgaacacggcctggacgaaaacggaaaaaatcactggattctacagtcagccaggctgaaatgataaagcccttcggggctttatcccttacgttttaattgtttcttctcgctggctttcttacgggcatcgagaaccagttgcgcataagttgcgtgtgctttttttactgtaccagcaggtttcccgtaaaggtcgtaacgtgttgcgcctggtacagtacaattctgaagatattgccaccggaacgtcatcacctgaaccgcacaattccactcttcaatcgtcagatccacatccgggttatccgccaggtatttctcaacgtcctggagaatcccgcttttcaggggcaagttctttttttcgtctgtccatagttcaggaaaaacagcacgaactttattgaaacacttttcaaaatattctttcggatattttgggggaaaagtgatttgttttttcaaataccagggctgaggctgctttttatgtgttttctctgctacagcatctttcttctgtactttcttgttttcattaactgctgatttttgtacttcctgcggcttttcattcaccacaggattttctggcatgaccagaacgcggcgttttttgaccacaatcacgggtgttttttttggctgcatactcgcctcaataattgctgtcatattgactaattataccattttcagcagttaatatcctgaaaatacatggaaaagggggtatccgtacagaataccccctttgcaaaggcgcttaatgccagaaccacatcatccccaaaaaggcgggctttcgcccgcctccgggttgctacttaccgttggattcgtaagccagacttgccgtaacctccctgtttccatctttcagccggacctcgcacaaacgattccgggtcagatacgtgaatattaacaatgtgcagcacacgattaataaacaccaggtcagggcgtttttcggctgtttcatggccttcttctccttgcgtaacgcgcggtaagaggctatcctgatgttgttgaagcattgggatcgcctcgtgggtgtactgaccccaaaaagttggacagttaaacacgaggcatataggtctgattccgatattcaattggagtcagaccttttaatttcaggctaattcttctgctgttgtagtattcaatatattccgtaacagcatccttcagttcgcttatattactgaactcatcaagataaaaacactccgactttaaggttccaaagaaacactccaccacagcattatccagacaattgccttttctggacatgctttgtttaataccatgttctttaaggatattttgatatcttctcatacgatactgccatccctggtcagagtgcagaacaggatgctcgtgaggattaagctttttgaatgcctgatcgagcatattctcaaccatgttcatcactggtctttccgaaaggctgtaagaaataacttcgttgttgaagagatctattactggagacaaatacagcttgcgcccattgactgcaaattcagtaacatcggtaacccacttctcgtttggccgcgtagccttgaaatctctttggagaacattaggggcggtttgccctacctctcctctgtaagagcggtatcgcttgaccttaatcgctgctttaagtgagagggttcccatcaggcgctgaacagctttatggttaatctgtttcccttctcgatgaagagacagcgttaccctacggtatccgtatcggcctctattctcgtgataaatctcactaatacgctttttaacgtccgcatacttgtcaggcttgctgagagcctttagatgataataaaacgtactgcgcggtatctccgcagccctgagaagctcatcaagaggataaaactgccttagctcgttgagtactttcactttttcgtgggatgagctaaggctttcagcttttttagatacataagccgcgtttcaagaaatcgaacttgcctttcaagatcctcaatgcgtcggtcttttgacagctccaatgctgatgccgctttttctggatcaactgatattgcaatgtttcttttggtgccaatcttgagcgcgcgtaaaccagcttctccgcgctcttcatagaccttcagccacctggctacagaaccactaccagcaagcataaagtgagcagcagcctgattaagggacatgtgctgctcgatcacagctttcacgaccttaatacgcaactctggatcagcactaacgcctttaggtttgggaattaaacctttttctccatgtttttcatagagggcaacccatgtcctgacctgggttcgggggacaccaaaacgtgccgagatgatcctgtaaccatcatcagttgtgaagtagtgattcacgacttcaaggcgcttttcaaaagggtattttggctttgacatattaggggctattccatttcatcgtccaacaaaatgggtgcagtacatgggttaatgaaaaattaactacggggctttcttctttctgccgcacaacaagcatcagcagcagttccaggcttccggcaaggcgatcaacgacaaggtgcggatgtatgggcgcatcggtcaagcgttgattgaggccaagcaaagcggcagcgatccgttcgccgccatcgaggccgttatgccctgggacaccttcgccgccagcgtcaccgaagcgcaaacattggcgcggcctgccgactttgatttcctgcaccacatcggtgaaagctatgccacgctacgccgctacgcgccgcagttcctgggcgtgctcaaattgcgggctgcgcccgccgccaagggtgtgctcgatgccatcgacatgctgcgcggcatgaacagcgacagcgcgcgcaaggtgcccgccgatgcgccaaccgcattcattaaagactaactatcagaaaaactcatcgagcatcaaatgaaactgcaatttattcatatcaggattatcaataccatatttttgaaaaagccgtttctgtaatgaaggagaaaattcaccgaggcagttccatagaatggcaagatcctggtatcggtctgcgattccgactcgtccaacatcaatacaacctattaatttcccctcgtcaaaaataagattatcaagtgagaaatcaccatgagtgacgactgaatccggtgagaatggcaaaagcttatgcatttctttccagacttgttcaacaggccagccattacgctcatcatcaaaatcactcgcatcaaccaaaccgttattcattcgtgattgcgcctgagcgagacgaaatacgcgatcgctgttaaaaggacaattacaaacaggaatcgaatgcaaccggcgcaggaacgctgccagcgcatcaacaatattttcacctgaatcaggatattcttctaatacctggaatgctgttttcccggggatcgcagtggtgagtaaccatgcatcatcaggagtacggataaaatgcttgatggtcggaagaggcataaattccgtcagccagtttagtctgaccatctcatctgtaacatcattggcaacgctacctttgccatgtttcagaaacaactctggcgcatcgggcttcccatacaatcgatagattgtcgcacctgattgcccgacattatcgcgagcccatttatacccatataaatcagcatccaggttggaatttaatcgctgcctcgagcaagacgtttcccgttgaatatggctcataacaccccttgtattactgtttatgtaagcagacagttttattgttcatgatgatatatttttatcttgtgcaatgtaacatcagagattttgagacacaacgtggttcccgccatatgaaaatccggccagaccaacatcattctggcgctccgaaagaagggatattcgccgccgtgaccagcctggagcgggtcgcataatctttggccgcttcgtagtcgaggaacatggcatgaaccacggcagcctggcggctgcaaattgaaaaccgccccggttcgtcctgttgttgccgcacgccccgcagaatatgtatgctctgaggacctgttttattaaggactcatccccttatgttgacccgcaaaagtatcgatacagttctgctctctgttggtgctgagaagctctcacaacgagaatgggactggatgaaaatgctcaaacccatggacccaccacctgcgatggtgacgacctccatcctgaagcgccgtggcgatacagcagcccttaccctgctacaggataccggggtttaatccatcctcatgttgtccggttttactccccgccctctgaaacgtctgttcacagccaaccagtgctggacgtccttcctggatgcgggcggtctgcgcgatatcgaggttgaagccgtcaccaaaatgctggcctgcggcacacggatactgggtgtaaaagagttcgggtgtgataacccggactgtcagcacgtaaagtacctgaccaactcatgcggcagccgtgcctgcccgtcctgcggaaagaaggccacagacctgtggacagcaacacagctgaatcgtcttcctgactgcgactgggtacatctggtcttcaccctgccggacacgctgtggccggtgttcgaaagcaaccgctggctgctgaatgacgtgtgccgtctggcggtggagaatctgctgtatgccgcccgaaaacgggggctggaacccggtatcttctgcgccatccacacgtatggccgtcgtctcaactggcatccgcatgtacatgtgtctgtaacctgtggaggtctgaataagcatggtcagtggaaaaagctgagcttcctgaaagacgcgatgcgttcacggtggatgtggaatatgcggcagctgcttctgaaagcgtggtcagaggggatggcaatgccggagtcgttgtcacatatcacgacggaatcacagtggagaagcctggtgctgaaatccggcggaaaatactggcatgtgtacatgtcgaagaagacagccggagggcggaatacggcacgctacctgggtcgttatctgaagaagccaccaatagcggcttcccgactggctcattacaacggaggggcaagcctgagcttccgttacctggaccacaaaacgggagaaacggcgacggaaacgctgacacagcgtgagctggtcgcgaggctgaaacagcacatcccggagaagttttttaagatggtgaggtacttcgggttccttgccaaccgtgtgtgtggagagaagctgccgcaggtgtaccgtgcactggggatggataaaccggaaccagtggcgaaagtgtgctatgcacaaatggtgaaacagttcctgagtcgtgacccgttcgaatgcgtgctgtgtggctgccggatggtataccgccgggccattgcggggctgaatgtatcagggctgaagaaaaacgcgcgggatatcagtctactgaggtatatgccggcctgacacaggctaagtgtgcccgggaatcggtgaaagtataaaaaacagcctgttacggtataaaaatcgaccatacagagagggaaaccaccggagtggtgggaaaagcagaaaggctcacgtggcataaggcgtggacaatggtatcgactggtttttcaatttcctatacgtcaagatacaaaccaccttttcgccatgaggcagaaagcctcaagcgccaacagcattatatattgaccaggaattaaattcccagctttcggcgtggactatacagtgtgtgattcaccacgatgaatcctttgttgatccactgtgtgacctgcgcaggttgaactccggtcagcctggcgaacgatgcctgattcccccgatagaacttgttgatgtattcaatcaaaggcattttttaattctccgaaacaacgcaaaatcatatagtaatttactatatgatttttattccgcaagtgattaactcatcggatttctttgtagttaacgaaacgttaaatttagtttgtgcctggaatggcacgcaagaagcacactagcattatcattttgatcaaaacgctatttccccccgttattggggggctttctttttgatgccgcgccagcggcatgtaaggcggcactctgttgttttatatggcacagagctaaaccgccgaagcccggcgtaagccggtactgattgataggtttcaccttacccatccccatcctgctaagccatacccgctttcagccatgaaatagcttttgtgcgcggtcggagtggtcccgacaagggtttacccgcagtcggggcgtatctccgcgttagcggaccgtcagggccgcttacgagcgtgtatttggtacttccagccagaaggctgacagcgatgagatttcttagttacaacatccattattgaaagcgatgttgttcccgccctttgggcgggggcggcggcgcttttcagtgatgggttgggcactgtggctgagtatttgcagcgtttttttgtaggagggttggaggggctttgtttttcattaggcagaagtccatatgcccgccgcgaagcggtgggaggtacttttatattctgagcggcgcggcgttagccgctgcaagcgaaggcatttttgtgattatccacagttgtttcaaagataaatattttccctgcggcgaagcaacgcaggggattaaagaacaggggttaagaatatattgcgggtttgatgttctatgtttgctgctttctgaagttattcctttgcgggtttttgtggataaccgaaggcgtttttactccgataccctattgcggccatcaaaaaactgtcagagcgggacaaaatgaaaaacggtcgtcaaatatgaggaatttcatgaaatgcaggcaacacgaaaagccccgaaggggctgaagagagtgccgattgtatcaggcagctaaactagtggggtggcgaagctgtcagagccagttcaagctgacgtagatctctggctaccagttgctctaatctttctttagtgcaccagtacgcttcgtccggcggcatacgcttcagaataaaccgcgcaatttcgtttcgctgttcatcatacggcagttttgccaggcgattagcacgtttgcgctccgctgctttcttacgtcgggacttgatggcatcgagagaacgctgcgcataccagcgtttacgagccgagtgaacagagatttcttcgccctcgcggataacgccttctttaatcaattgcagacggatttcactttctgcaaggcgcttacgttgctgctcctgaagtttcaccagatcaactcccagcattttccagccagtttcggtgatccagacgtatttcggcagtcgctggcgggattcacgatcccatatcgtcttttctgacgttcccaacgtgccaaaggaaacctgctctgccagcagacgggaaaggcgcgatactgtgactgcggtttcaggaatcacgtctcccttactgtcttttgggcttatttcttctgccaggcgggagacagacatgccgacagtgtgcaatccacgatcacaaaaactcacaagtacaacccatattgcgtcaagcagccgctgtttctccggtcggaatttatatttgcgaccgacactctgacgtttcagtacataaaatggatgcaacgacatgtgcattctgagtgtgttctgaccagtgaccgggtcttttttaacgagacgattgtaagcgtggcccaactgtccgcccagcgccttatagttgtcgggacggaaccaggctggattctcacactttggcttagtggaatgttcaccccggcgacgttttgttgttccgcctttgttttcctgggggaccaggaatgagctttcaattcccgcttcgtagtcctgccagaaacggatctgctcttccggtgatagttcagaccagtgacgtttgctaatcacagcaagctgcacttagcttgcactgtaagagttgatatttccttctcatggaattaaactccacttcaggtaacaagcatacctgaaataaataagctcaaggctctgccttgatgtcagcccccgctaatcttcgctgcctggaaaacacgagattacgggggttttctttatctgaaatttacgttcttgaacaaaatttcagcacctcgttttctgcatttacaaatcgcggaaaacttgcctgcaaatttagcagcatgggcgcaatcgatcaacgatgttcaagcctggctcgtttcctttttgattcagcacacatctctgacagcttcaaaatcgttttcagaacagctactgaagccccttctttactgacgttccccatacaaaaccttacaaaatcagaaattcagaattttgtatattcaaaaaagtttttttgactgcatacacccactcacacgatcgaataaaccacacaaacagtattatctagatttttagatcgtacatcatttaacaaacagaatattattctgctttttagatgttatctagatcattagatcgctcacgcggcattgacaggttttaaatgtcgcacacacaatactatccagatgattgtaaaaagctcgttcatcgcgttttttgtgctcattgcctggaaaatgagcactctttgacgcccgttagaacgcttgtcatctcatgctctttaacaaccccggacagcggtcattgcctaaagccctggcataaggaggttattattcgtgcatttcaagcaccgctggcatctgtcagcaacgggctacgtaacagagtgacgtgccgcgccatctacacaggtaacgactctttatccgcaaatatcattctgcatacttaaacccccttatttggtgaactcgcgttgagttaatctcactcactctctccctgagcaagtcgtacaggctgcaacgcagaagtacaccagatttgccagtctccactccaggtaagggggtttagctatgcatgatgatgaacaatcagataaagagcctgtagtgagtggctgcaacttttcataattagcttatgacgctgtattccggggatgtttctatttcagacaaacaaccgggagaaaatatggcgcgtaagttaaaaattaatcctgtcattcctgaatgtgtggcagatttgaaaggatatccactctatatcatcgttgcttattggggattaagaaataataaaacgctcacaacaacggatgttagccgtaatttccttattacacagcaacaatcttatgatgtgcttacctacatttaccaggaagcacagaagcagataacagcaactaaacgaacactatttaacgagcacaaaagaagaattagtgcgttcaggattcttgatattgacaaaggcatattgcgcaccccaaaaaaagagattgcatatgccagctacgacaatataccaactgtaacaatgaaaagtacccgttgtgagatccaagatagttttacagaactgcgccgctggatgtgttcaagaaagacaggtgatcgagtggaggtatttttgaatgtctaagtaccaaataaacgcaaccatcaaaaaaccaggtggtggccccgtgaaatggactcattacagcgacttccctatgaccgctgaagaatgcagaaaaaacttctcaaaagaaaaagaagcaggaaagtgtttttctgttgatgttcatatttcagatttcatttgcaaagaaatacatccactgtgatgaatggggagaggattaatcatgattgacgctataattacgccaatagttacatctattccgttactcttattaattttagttgcgctgatattcgttaaatctgccgtcaaaatcgtgccacaaggtaatgcctggacagtggaacgctttggtaaatatacccatacgctttcccccggtcttcacttcctgatcccggttatggaccgcataggtcaacggatcaacatgatggaaaccgtcctggatattcctaaacaggaagttatttcgaaagacaatgcaaacgtaactatcgatgctgtttgttttgtccaggtcattgatgcagcgaaggcagcttatgaagtcgataatcttgcatcagctatttcaaatcttgttatgaccaatatccgaactgtcgttggtggaatgaatctcgacgatatgctttctcaacgtgacagcatcaattctaaactgttaacggttgtcgattatgcgactgacccgtggggaattaaggtcacacgtattgaaattcgggatgttaaaccaccaaaagaactgactgaagcgatgaacgcgcaaatgaaagcggaacgaactaagcgtgcccggattcttgaagcggaaggtatccgccagtcagaaattctgaaggcagaaggggaaaaacagtctcaaatactgaaagcggaaggggaacggcaatcagcatttcttcagtccgaagcacgcgaacgtcaggcagaagcggaagctcgcgcaacaaaactggtgtcggatgcaatcgctgaaggtgatgttcagtctgttaattactttattgcgcagaaatacactgaagcactccaggcaattggcacagcatcaaacagtaaactggtgatgatgccgcttgattcaagtagcctggtgagttcggttgcaggtatcagtgaactgctaaaaaacgtatcacaggatactcccaaagttgatatgaaacaggctcaacaatatttgtcttaaaacagatagcggacggtgacaatattgttttaatcaccgtccttatattcatattcacgaatgagcaaatcattaaaatgaaaacttatgggttcatccttcttattttacatataatccctatgggggcatggttctttcttctttttattacaaacgatgagaacaaagtagaaaaaatacaaaaccacatcgtatcaatatttccattatggctgaactggggaggggtgatgatagcgatggctctactgcccctgttaatatggagttttaatggcatattcttcggcttctttctgctaatttatgcatttggcgtttataactaccttcatcttctttattcaatttctcccttttatcatggagattagccatgttatggtatacactatttcttctgtgtattgcacttgaacttataaccggaacaggatggttactcttaatcagtcttggtgcattatcaagcgccattgtgggcttttttcttccgatatcacaagaagccaatatatgcttctttgcgtcaatcagcatactggcgtcgataattaagttcttctatgacaaaaaacataagaaattagacactctcctggtgaacccagggcattcacgttttaaaggaaaagaatttacgctcagtgacgatattgttaacggcaaggggcaattactcattggtgatacattctggcctgttgagacgttacacaatgaaaactaccttgcgggaacaagagttattgttacagacatgcaaggaataactcttaaagtaatgaccatcgaagacaagagtgaaaacaaggaataaatcatgcatctttcgttgttaattccgcttacaggagcagcgatgaatgcactatgtatttttattatcagacttctggataaggattttattgaagtctacaaaaaaacgctaaaaaaaattactgcattacatattttattgatggtgttaagtgtcacaggaatagtatgaggacaattctatgcgaaacgcaaatgaaggaatttctcttgcagctattgtagctaaagaaacaacaacaggtaaatggaatggtactggtgggggtattggtttaggtactggtggtattggcttattcatcggaggtgtttctggttctaaacaagagcagacacaaagggcaaaaaactttgaatcgcctaaagaggaagaatacagtctattaaatgtatacggttcgataataaaagttctcgttttcggcgtgctatttggtttatctgcccgtttatttacatctttatcaaacactggttctgattttgctgaaccagtaacaaccaccacagccacaggaaagattcaatctattatgggtggcatggcagaaatggtaagcattttaggcaccgttgtcccttttttagtaattatcacagcaatgatctggtttctgtttttcagcagcaaacgagaaaaagaagagttaactcgagttgaacgtgaagctgctaaaacaaaactccgtatagatgtctatcaccgtttacgttacgttgaaagcgatcatgtcgtttttgacccgattacaggccgggaggttccggcagaacggacgtgtattaataaactgattgaggcacttgttgatgaaagcaacgacatctcaaaaagaaattgacgaacttctgaatgcaataaaaacaggacattcaaaattcattctatcaatacccgtacatactacccatccaatggcccataaaataatgaagccttacttcaggagaacaggaccgcttctgtattcagatagtatattcaggatttgaagaaagcatttatttatatagggcatacaaaaatgagtgcttttattaagctggcatctgttctggcgttatttattagcccggttgtggttgcaatagcaggagaacaatctcactgtacaaaaatcaacgaataccctttcatcgtcactcaatgcgacgacggaactgtgacagtggtaaatgtgataaataaccgtgtagctgtgtgccgtaaaggggaatcatgcaaagaaataaa

SEQ ID NO: 163 - DNA, 65562 bp, Artificial Sequence
  plasmid TP114 delta repAoriVR6K-cat
attataactctggacacattacatgactcaagcaaaagctaatctgagaaaacttcgccgtgcacgttatgtcccccctcgaacagtaaagaaaagcatagcgaatacagaacgtgtcgtttcaaaagcaattaccggctgtggtgtcttccgtgatataccacaagtaaaaatcaatctcatcgaaacaaggaaaattttacaaatcgaactggctttatccattgctaacttatctgaggcgaatccaattgagatacgaaaaaaaatcaaaagcattgaccgacaattatcttcaacctcaaaaatcagaactacattatgaaaaaaaacgacgatttaatcactttaccacctcataacagccacgctctcgattacatcattaaaaaagcgtttacaccacgtaaaaccaaaacatcgacagcgacccacaacgtttatagttacaataaagaagaatccacattaaatttccaaaaaattggagaagcaatttttttcggcacagacctggtaattaagctgaagccaaatattagtgcctctggtgaactcttcatctgccagaaggactaagctatgaacattgtttcagaatttcttgagaaagtaacaaccattgttgaatccacagcggcgacgaacgccgctaaggtcgcacaggcaatatctcctacattttttgcggctatagccttatacgttatttatctaatatatgaaatcacgtatgcccaacgtgacatccttatgaacgaggtgacgaagaatatcggtgcattcgccctggttggtgcattcacttattcagcgccttattacagccagtttgttattccttttgtaatgcacgctggctccgacctttctgctgctgttactggaggttcaggaactgcaaccagtgttgataatttgtggaacgctctatctacgaatttaaacaacttccttgatacaagtatgagtatttatggaaagttccaaattgctgagaaaatgggggtttatctagtatgggggattggctatatcggcggaatgcttctcatctattacactactgttttcttgacactatcaactttcatggttggaattcttctttccgctggcattttattcatttgtttcgctctattttcatcgaccagaaatatgtttactgcatgggtcggcagttgtctcaactatatactgttaaatttattctatagcatatcatttagtttcttaattagtttcgttgaatcagttgtccctgttaatggagatataaaactatctattgtagtttactttttccttattactattatttccatattccttatagaacaagttggcacactctgttctacattaacaggtggggtaggtataaatggccttacatcagccgctaatggctttggaggtaaggttgcatctggttttatgcgagcatcaggactccgatctttcaccaatggatttgccagcaaaatgccaaatccattctttaatgcaggaagtcgttctgcatcagcattagttcagggattaaaccgtggaagtaaacttaaagcggggtgattaacatgaaagataaagtattatcatttctctttgctggaataattaccgtaacatcaccatcaatctttgcatctggtattccagtagtagacgttacagcgatagctaaaacagttgaagaagggctaaatcgtgccgctgaagcggcaagacagcttgagcaactcaagcaacaatatgaacagaccataagatacgctgaagaacagaagaaaagactcgaaggcttcactgatttcagcaatggctttgatagcgcatccagctatatgaaggattctctatcaacaataacaaatagtgcaaaatcagatcttagctctttgcgatcgcaatatgacttatcaagcaacattgcagagacgcaacaaaaatatgatgcaatcctggctaagatcaaattctatgaaaatttcaacaatgaaatgcaggaaagggctaagagattaaccacgttacagaaggagttcgcgtcagcagatactccgcaaaaaaaagctgacttatctaaccaattgaatacagaaaaattgacaatggagctacaattgaagcaatatgatattgcagagagacagctaatcgcgtctgaaaatgcaagacaagaggctgttagtcgagaaaagtttaaattaatgatgcaataggtgttcgaatgaaaaaattcataagcactttaactatcttgtcatgcttccttttagctgcttgtgaagacaaagtttatgatgtcagttactacactgaacatcttgaacaagcccaagatgttgtcgaaaaatgcagcaaaggggatatgtctggtcaaaactgcgaaaatgcgcgtgaagccattcaaaaagagcaatcgggtaaagcatttaaaaatatgatgcaataatccttcattaaaaacagctcgcaaagcgggctttttttggctgtacgcagtgaccagttgataaatagttctaatgttcgtgctgcattagaacaacgcacaaaaagaagagtacaagaagacagtgcgggatctaatggaacgtttacaatagaatcaccttccctatagcaaggtgattctatttaaaagaatacccgcctcgtgcgggtcttatcttgcttaaagatctatgaaacctccggcttcgggtattaaactataacttgctttggcaaatattgtttcattgacttcatggaatcttattttctccgcctgttcatatgttacagggaagaacacgccccctggctcattaaacatcataaaatcaccttgcattgcgttacaatgacaacaatgattcgcgtaatacttcatttttgctgttttgctatgggatggataatataattttgaatactcattaatccttgagagagcagaggttgaaattatttcaattttcgttaaatcagtccaccatactctactggttaaccaccgataaatcatatttttctttgaatcaaaatactccatacccttaggggaggatgtttcataccattcatctaatatacaatcttcccattcggcaggatcaactccccaaataacgtctctatacttataccaacgaggcaaaaaaacaccaaacacaggagttattttcttacagcgccaacatgactggtaactttccgcaatataaaaacgttgagaaaaaatattgtaatcatgttcgtttaattcttttacccactgaataaaataaattggatttttcccctgtggaacaaaccatttccgttgttcttgatcccattgcgcccctttttgtttggctaactccttttcttcaaaaggtacatttaaataaaaccgcgccataaccaacttaactccagtattctgttctgatgatgcaacaggatagatatcaaaactaaacaaagagtgcaattccgcctttaatggctcattcgtacccgcctcgtgcgggttttcttttgcctgaaatatggaggaactccatgaaatccatcattttatcgatggttgccgccaccgcattactgtcaggctgcgcggatagcaaaacacaaccagtacctgagtcaccgttaaccaaacatgaccatcagatcacgttgaaaattgataccgtgcgaacagacctgccggacagttctcctgtttgtttgaatggtatgaatatatacgaaagtctgagcgagcggcatccaggcttgtttgccaaaaatcagaacgtgattttccgtagtgcattctttgatgacggtcaggcgatatcctccgaaacaatccgcaaaataatgcagagtaccccgtgcgttgaatcacaaacaacatctgccggaagctgggaacctgccacggaactgctcccccgtcaggcaatatccggtgacactacactggctgaaaaagatcggactgctggcttcacaatgcggatagcaccggagattgagcgtggaaatttccacctgctactcacaaccactgacccgatacggaaacagactgtcgagcagaatattttactcaaaccggaccagccccttatcgtgagtggttttactggagttaatgctgatagccaaagtgagaaccggattgtcatcattacgccacacgtgcgttgattcccctgatatttaaattacccgcctcgtgcgggttttcttttgtctgaaatatggaggaacaccatgaaatccatcattttatcgatggttgccgcaagtgctatcgcactctctgcccccgtatatgcgtctgatccgtgtgcttccgttctttgtctgtacggtaaagctatcggtagcggcggcgggagcgaatgcaaaagcgccgaaaaggacttctttaatatcataaaaaagaaaaagggatctattcgctggagcaaaacctttgatgcccgaaaagcgtttcttaatcaatgcacgaccgcagaccctgcggcgatctcaaaaatcatgagtaagttcggacgttcctggggttaaccatgaaaaagctcattattattcccaccacattattgctgaatgcgtgttcccatgcccctgaacccgcacaggcaaaaggaggttggtatgaactgaataccacaattgagcaggtaagagcagacacatactataacggggtgatccttcagcagcccgtgtcacagccaaacagcactgttcaatacagcaatgataattatctcaaaaaggaaaccataaacgtaactcccgcgcctcgtattgcagaaaccgtaaaaccacgttctgagcaatcagcgacagcgccaaaaaaccagggcagcaataatagttttctgaagccgacaacaaacagcataacttcatctggtgagataaaaacagcagccaaaggagcaactaaacagcattctgaacaaccagcactctctcccgcaaagccaatcagtagcaacaaccatcaggcacaaacggcacaaaagactgatcagcagacaaaaccgcgtcctgaacaaccaccgctaatgtcaaaaagcggttttctgaaaaaaaacgctaacaacgctgttccggccaccacgcttacaggcccatcaacacctgaaaagcaaatttactttgttcgccatgatggtaaaggctcgctgcaaaaagcattaaaagaaattgtcccatcggactggacggctgaaatatccccggaggtaacgaaaactttccgtcgcacgatatcctggcagggcaacgatcaatggccttatgtcctggataaaatgcttcgcaactacggtctgacggtaattaagaacaccgaaaaaagacatcttctgattgattttcaacaacagaaagggaaaacatcacaaaaagcacctgtatctcctgacaaaacccctgcatctcctgtcaggacaccagtttcctctgacaagttacctcaaaaaccgctaacgcctgtcaccgttccgcaaaaacagacagaaaaactcacctggaatcttaaaaaaggttcgacgctgcgggatggcctcaccgaatgggcgtcaagttcaccgtgtggtaattcaacctggaatcttgtatgggatactcctgtgaactacagaatagatgctcctcttattttccggggaaactttgaatctgcattaaaagatacgctgatgctttatctttcagcagataaaccgttatacgcattcaggaatattgcacaatgcgtaatcacaattaaagacacacaacaggagtaatcgctatgggttggttcttcagcttgctcctgatattcctgtcaataggcagttactatctgacagataacaataaccaaaccatacagcgaatgaagttgcttcctgcaaaacaggaagcaattgaatttgtccatttcgcaaatgttatcaatgactatctttataaatatccagacaaacgtaattcaggaggaacgttaacatctgagcaaatcggtataacacccgtttatgatattcatcatattatttacggtaagcgagtttatatctggtctgccgatacagaaggtctgatgtctgctttgcagcagcaaacaaaacattcagcaatgttaggaagagtaaaaaataagaagattgtcgataatcaggggaatgatatgggcgttcccgttccttcctccattccagaagaggctattgtactcattaactaaatatcccctgacaaggggattctgaactggagtctgcatatccgacacatcattatgtgggccggatatatcgctacggcgcggacttcagtccagaaaatctttaccggagatacccatgcaggataatgatgatgtcagcgagcttgatattgccactcgtgaagtccttatcttacgatgcaatcttattcagcttgcttctgaatatataaaaataaatcctcttaaaaacacccgaatctacacagatttaattcatcgttcagcagatgttatcaaaaatatcgaacaaggtaacatccagaataaacataattatctgtcacaggatgtaaaacatacgcttgttttatacgacctgtacaaatcagactttgaacaatgtccgggggcaaaatcccttatacctgtcagggaaaaaattgtctcgctgaaagaacttctttccggcgctaatgagctggacagtatcgttcgtcgcccccgcaggaaaaaacgttcttcacgaatttaatatcaggagataaatcccttatgcagttatcagcggctgttctggcagcactgataagtcagtgtgcccctgatgtatcacccgatacgatgaatgccctgattatgactgaatcaggggctaatccatatgtaatagcgaatgtttctgacggaacaagtaagtattttaaagatgaaaaaggagctattgaatatgcagaaaaattaacagcagaaaataaaaggtttagtgcaggtctgacacagatatacagcaaaaatttcccatcactcaatctgactaataaaacagtttttgacccgtgtacaaatataaaagcaggagcggcagtcctgacggacaattatctgagacaaaaggagggtagtagtaatcaaaaaattctccgcgctttatctttgtattattcgggtaacgaatcaacaggatttattaaagaaaagaaatttaacaacacttcttatctggaacgggttattcgtaacgcgaataactatatcgtgccatcaatccgtgaaaaaactgatgaatcagaaataaaacccccgaatgatgaagagaaaacatcaccggactgggatgtttttggagattttagttaatgaaagtcaaatcaactttgcagtattttatcctggcgtttttcctgtcactaactgcctccgttgcctatgcaggtggactcgataccgcaacaaataccatgacagaacttaagacatgggcatttagctttggtggtgtttgtgctttgtgttacctgatctataacgtcatcatggcattcatggagaagaaaagctggtctgatgtaggaatggcgcttgtctattgttccctcgctggcggtgcactttacgccgggaactgggcgctggaactcttcaaataagtaatccatatatacaactgtgccgcatatttaccttatgtgtgaattgcggcttttttcatggtgagttatggacaaagtaaatgaacatgtcagtgagtcattcatgacttataacgggtttaaccgtcctgcgttaattgctggtatacccttaatgttgttattgttcacggcttttttcgctgttctgacaggcttccccgctattttcctttggggtataaaagggataattattcctgtcatatgtgcgctgtttctttttatagtaaaactggcctgtgaaaatgactcaaacgcactaagagtcatccgtttaaaccttatggggcttttgttaaaaatccgccacagagatttaattattggttattcatctgtcaggtaacatatatgcacaaaatcaaattaaaaaacagtgacaatatggatgttgctcgtgaatatcccgattatcgcttccatataacagacagtattatctttacttctgacaggaaaatgctggcttcacttgttgtagcaggcattccatttgagacagagaacgataatgttcttacaaatttatttaacagcgttaaaaacttcctgattgggttaggaaaggaaggcgacctgtatttatggactcatcttatcaagaaaagagcaaccatcaatggagaatggaattttgacaatgattttttaagcaggttttcaaaaaaataccttgctctgttcacatccagcgcattctataaatcaacatggtatctgacatttgggattccctacgatgatgttgataccggaatcgagcgcatgaatgaaatgacacaacaggcgcaaaaagcacttctaccatttaacgcttctttattatccgtttacaatacttatattagtgaggtggcagactatctatcactattgctaaatgcagaacataacatgattcctttatcatccacccccttatcatccagtatttgtgattctgaatggtattttggtgctgatgttcttgaactgcgtaacaacgaatcggatagtaaaaaattcgcaacgaattatattttgaaggatttcccgatagaaacaacccccggacaatgggatttccttctcaaacaaccctatgaatttattcttactcaatcctttatttttgagtcaccaacaaaaaccctgaagaatatcgattcacagttaaacaaactacaatcagctaatgatgcagccaaaatacagcaggaagaactcgaagctggtaaagaagcggtcgcagccggaattacgttgtttggttcactacactgcgcattaacggtattcggtgatacaccagatcaggccagaagcaatggtataaagctctctgctgagtttattacttcgggtaagggattccgcttcagtcgcgcctcactcgcatcaccttttgtttttttcagtcatatgccgctgaataagaggcgtccactggatacccgaagaacaattaccaacctggcctgtctgatgtcttttcacaattattcctccgggaaaaaatcaggcaatcctattggtgatggctccgccataatgcctttaaaaacggattcaggcagcgtttactggttcaatacacattacagcccaccggaaaaaaatgttaccggacaaaaaattgccggacacgcaatgtttcttggcgcaacaggcacagggaaaacaacatttgaagcaacagccagcggctttcttcaacgctttgaccctttaatgtttgttgtggattacaaccgttctaccgaactttttgtccgcgcatacggagggagctatttcacattgcaggaaggtatctataccggctgcaatccgtggcaactggcagaaggcccggaatcgcccgtctggcacagacttctcgcatttctgaaacgctggacacaggttctggcacgagacaaccagggcaacccctgttctgatgaacatggcattgaattaaacgctgccgtggaaagcattatgcgaatgcctgtcgaagaacgccggacagcccttcttctcgatatagtcagtcctgaacttcagacgcgtctcgccaaatggtgcgacaacggcgaatatgcctgggcggtggattccccccggaataccttcaatccactgcatcataaaaaagtgggatttgatacaaccgttgtcctggacacaaaaaacggtattcatcctgcctgtgaacctttactcgcggtcctgtttttctacaaagaaatcatgcaacgcggcggcaatctgatgctctccattattgaagagttctggatgccagcaaactttcccatgacacaaagcatgattaaaagcgcactgaaagcggggcgcatgaaaggtgaaatgatgtggttaacatcacagtccccggaagacgccataaactgcgcaatttttgcggcgctggtacaacaaaccgcaacgaaaattctcctgcccaatcccgatgcaaaatgggaaggatataaagaaattgggcttactgaaaaagagtttgaaaaactcaaagagctgacgaaggagtcaaggaccatgctcatcaagcaatctggctcttctgttttcgccaaaatggatttgtttggattcgatgagtttatccccgtgctttctggctctgaaactggcctgtctatttttgatgagattattgctgaaaaaggagatgtagctcctgatatctggataccagaactcctgaaacgcctgaacggttaatttctctgttttatacagaacggaaaacaatatgaaaatccccctcataattgcctccgcgctattaattagtgcatgttctcacacccccaatcctgtgcagaaaaaagggggatggtttgagttaaacacagcaattgaacagatcaaagcaggtgattattaatggaaaacacaaactattatgaacattcaaaaaaagaagccaccaaaaagaaatttgaagaaaaaaacgaaaaaaaggattatttcaaggccatacgtgactttgagcgcagtgaaattgaaatcataaagaaaaaggcaaaaacatttaccattctcgccattggtgaatttgttgtaatttgcattcttggtttcgcaatagcctcccttgctccattaaaaaccgctgtaccgttccttgtgcgagtggataacagcactggatatactgatattgcccctcaattatctgatgctaaggaaagttatcaggatgttgagactaaatatttcctgtcaaaatatctcattaactatgaagcatacgactggcagaccatccaggaacaggccgatacagtaaaaacaatgtcttcccaaaaggtgttttcagcttatgacaccatgattcgtgctgattcctcaccactgaacattctgaaaaacaactacaaaattaaggtccagattaattcagtaatccttctaaggaaggatatggcgcaggtgcgtttcaaaaaaatggtactggatttatctggtaaacccgcccccggatacagagcaacagagtggatttcgacgatttcttttgactgggataaagatatcaaaacagaaaaagagcgccttgtgaatccgctgggactgcaagttctgagctaccaacctgatccagaggttataaaatgatgcttaaacgcactactgcgatagttcttttgtcgatgctacaagtacctggtgctttagcagctatgtacggcacaccatcggaacgagacgggcgtattcagaccgtagattataacgagcaggatgtatttaatgtgcgcgtaaaagcaggcgcacaaacaacaattaagttcggacaagacgaaacaataaaagatgtcggaattggtgatccagaagcctggtcagtatcggtcagggacaacactctgtttctgcgtccaaaagcagaagaaccggatacaaacgttaccgttcagaccaataagcatatatatcctctttacctgatatcaaccacgaaacaacccacgtatattctgcgttttaattatccgaaaccaccgtcagctaccgtaatgactgaaaagccatttccatgcactgatggtggaataattaatggtcattatcaactcaagggggacaaatcaattttcccttatcaggtatgggataatggcgaatttacatgcatgagatggactaataaacaggaaattccggtcctttatcgtgttgatgccgatggaaatgaacatctggttaacggagacagaaataaaaacacaatggtttactatgacgtggctgaaaatctccgtttgcgcctgggtgatcaggttgcagatatcagaacatcatcaatcgttaatcgtccgtggaataaaaaaggtacgtcaaacggaaaaacacgagtagagaagttcagctatgaaaaataaagatgatgaaaaaaataatgacgcgggaaatcgcggaattatcgaagtaaaaggtaaagcagcaccaaaaaaaatattaatcctcatcatattactgattgccgcgttatttgtgatcattatcttgtttaaagttctgtcacgagaacaggtcgttcagcaaacacctcttgagaagtctgacgagacactggtcacaaataccaacaatggcgtttcactgacaacaatgatgaaaaacatcgaagaaaaggaaaaactcgatgccgctaaccgcaggaaagcacaggaggagcaagaacagaaacaggcagacaatgccccgtcagcgccagcatcacaaaaggccgatcaaacagccgtcaatgtgatagccaacggcactccccaaaccgccagtggagatccaaaccaaccacaaccattgccaaaatccgtccgacaactgatgggcgacacaatggtgaagatcgacaatcaggaaccaggcgaaaaaaaccaggaaagagatgatttacagggcagtcagtacgcagacggaaaggtatcccctgtgctgaaccgccgatatctgttatctgcgggaacagcattatcctgtgtgctcaaaacgaaaatcgtaacctcttatcccggtatcacaatgtgtcagttaacacgagacgtctggtcggataacggcgaagtgcttcttgcccgtaaaggagcattactgatcggggagcagaataaagtcatgacacagggagtagcccgtgtgttcgttaactggacaacgctcaaagatgaaaatgtcaatgtgcgcattggcgcacttggcactgacagtctgggtgcttccggccttcctgcatgggtcgataatcattttggtcagcgttttggtggtgcattgctgctgtcattacttggtgatggtttagatattctgaaaaacagcacgcaacaaacaggctcaaacagcaatatcacctacgaaaacacatctgacgcaacaaaagaaatggcaaaaacaacgctggacaatacgataaatattccccccacggcatatattaatcaggggactgtattgtctgttattgttccgcgaaatatcgacttttcatccgtatatgaacttcagtaattcagtaaagcaattgatatgaataacatcagagataccagtaatacatcacaaccacgagataacagtaaaaccgcaagacgatatctggatatgacgggtatccagtctgttcttaatattgaacatgtcacagaaatatctgtgaataaaccaggaacaatatggtttgaaggaaaaaatggctgggaatctaaagatgcgccagacgcgacttttgataatttaatgacacttgccaaaactctgacgaacttatcaaagataaaaataccacttagccatgataatcccattgcatcggtagttcttcccggtggggaacgtggacaaatcatcattccacctgcaacagaaaataacagcgttgtgatatctatccgtaagccatcattaacgcgctttactatagatgattatgtccgaacagggcgttttgataatgtcaggattgcgacgaaacacgaagccatcctgactgaacggcaacgctacctgtatgaattatcccggcgtccagatggtcaatctaaagctcaatttttaagagaggcagttaaagaccgtcttaattttttaatcgtcggtgggactggctccggtaagacaactatagcaaaggcaattgcagatatctttccacctgaacggcgttatataaccgttgaagatgtaccggaaatgtctctgccgctgcatccaaaccatatccggcttttctacaaaaaaaataccgttgaagcgaaggaaatcattgaagcgtgtatgcgattaaagccagatcacatctttcttgctgaacttaggggtaacgaagcatggagttatctggaggcgcttaatacagggcatgaaggctcaatcagtaccattcatgctaataatacttatgcctcattttcacgactggcaagtattgtaaaacaatctgatgttggtatgactgttgatatggacctcatcatgcgcacgataaaaacatcaattgatgtcattctttttttcaaccataccagaatgactgaactgtattacgaacccgaagaaaaaaatcgctttttgagcacaatgtaaattctggagataactatggatgcaaaaaagacggggggattaattctcttcctgttactgcttcttgtgggtgtgcttatagcctcaaactatctcggtggatacacagcattaagatattcatccgttgatatgtctttgctcaagtgggatacattccattctgtaatctcaacattttctggcaacccacaatataaaaaactcgtttttatggcatggtttggattcagcgttccattaatattctttgccatattcatgttaattgtcgtgattgggattatgcctaaaaaagtcatctacggtgacgcccggctcgcaactgatatggacctaagtaaatcaggttttttcccggataaaaaatcaccttacaaacatccaccaatactcatcggtaaaatgttcaaggggagatacaaaaaacaatttatttatttcgccggacaacaatttttaattctttatgccccgacacgttctggtaaaggggtggggattgttatccccaactgcgtaaactatccaggaagtatggtcatactggatatcaaacttgaaaactggtttttatcagccggattcaggcaaaaagaattagggcaagaatgctttctctttgcgccagccggatacgcggaaactatcgaccaggccattaaaggacagatacgctctcaccgctggaatcctcttgattgcgtcagtcgcagtgatttacttcgtgaaacggacctggcaaaaattgctgcaatccttatcccggcaagtgatgatcctatatggtctgattctgcacgaaacctttttgtcgggttaggactttacctgctggacaaggagcgttttcacctggaacagaaagccaaaggtcataatgtaccggacgttcttgtttccatcagcgccatactgaaaacgtcggttcccgatggcggcaaggatctcgccgcatggatgggacaggaaattgaaaaccgtagctggattagcgataaaacaaaatcattcttctttaagttcatgtcagcaccagatcgcacaaggggaagtatagaaacaaacttttcatcaccgctgagcatcttcagcaaccctattactgctgaggcgacgaatttcagtgattttgatatccgggatattcgtaaaaagcccatgtcaatttatcttggtctgacaccggatgctttaatcactcatgagaaaattgtaaaccttttcttctcattactggttaatgaaaactgtcgtgaactgccggaacacaacccggacctgaaataccagtgtcttattctcctggatgaatttacatcaatgggtaaatcggaggtcattgaacgcgctgttggttttacagcaggttataaccttcgctttatgttcattcttcagaatgaaggacaagggcaaaaaagcgatatgtacggtcaggaaggatggaccacattcactgaaaacagtgctgttgtgctttactatccgccgaaatcaaaaaatgctctggctaaaaagatttcagaagagattggggtgcgtgatatgaaaatatccaaacgctcaatatccagtggtggtggtaagggaggaagttcacgtacacggaatgatgatgtaatagagcgcccggttcttcttcctgaagaaattgtgtctctccgggataagaagaataaagccagaaatattgcaatccgtgaaattataaccagtgaatttagccgaccatttattgccaacaaaataatctggtttgaagaaccagagtttaaacgccgcgtggatatcgcccgtaacaatcatgttgacattccaaacctgtttacacaagaagtcatggatgaaatagcaaaaattgcagaaatttatctccctaaagctggaggaaaaaaagtcatggttgccggaggcaatgtgattactaatccagaccttgataatcacgataaaacagacgtatctgaataatcctcgcaaccagcaaatagtattttgcatattccataaggtaattaaacatgaataaaaaattgctttgtttattaatatcctcttttttattatcaggctgtgcaaacttcaaaaaaatcaatgctaatgaacttgctgccgaaagagacgcacaaaaagcgactgaatacgcgaaaaaaattcgtaataacccggttatccaggattcaacaaaacaatggattaatacaacgccaattattgaaaagcaggtaaagcaatcagcgccgccctgcccgattgtgattaatactcgttcagatattgagctacgccagatcgcacaacgcatcacacaaacctgtcatatcccggtacgaatcagcgccgatgtctggacctatctgaacggtacaggcactggctcaacacaacaaatgacaggctcaattccagcacctgatgcaaatggaatggttcctctggcgtcagtaggcagtcagccagtaaaagtctcttctggcggtacatcactccctgaactgaatatctccgggcttcctgccctactgcaaaccgtatcttcacggctgggaatatcctggaaatacgataaaggtcgtatcacattcttctatctggaaacgcgctcattcccgattacatatatggacagcaatgtggcatacaactcaaaagttgtgagcggcacaatgtcttccagtggcagtaccggctctacaagttctggcggtatgactggcgacgcatcaaatacgcaaactacaaccgtggaaatgaaatcatcgctgtacaacgacctgaaaagcgaagtttcctcaatgctgacaccaggtacagggcgcatgtatctgtccacaggttcactgacagtaacagataccccggatgtactggacagcgttcaggagattgtgaacaagcgcaataatgaaatgagtcgtcaggttgtgctgaacgttgaaatcctgagtatcaagaaatcaagccaggaacaggcgggaatcgactggaacgcagtatttaatgatggtcatcttggtctgagtcttggtggctcatttggtgatgccgccgagaatgttattaccagtggtgtatccatcgtggacggtaagctggctggctcaaaagcatttctgaaagccctgtcgtcacaaggcagcgtcagtgtcgtaacgcaaaactccgctgtgactaaaaacctgacgcctgtccctatgcaaattgccaatcagcagggcttcattgaaagtgtcacaaccgattctaccgccaatgtgggatcatccacgtcactgaatgcggcaacaataacaaccggattcaatatgactctgcttccatacattcagccggattcacaaaacctgcaattgctgttctcaatgagtctgtctgacaaacctacttttgaggtgttcgaaagtggcggcagtaaagcacaaacaccgaatgtggatttgaaaacaattaatcagactattgatctgaaatcaggccagacagtcattctgagtggattccagcaatcaaaccggaaaaccagtaagcaaggtgtaataaccccctccttctttggacttgggggtggcgttaacagcgaagacggcgacacgattctggtcgttttgattacaccaaatgtgcttaattccggctccagtgcagtaataaaaaatgtgaactaattaactgaaaactccctgaaaaaacacagggagtttttttggaggtcactttgtctgagaataatcagaataaccagaatttcacttcggttattaaaaacaagcgtgcttttttctccggtctggactggaaaacgcttccttcagaagaaaagaatgcgcgtacattcgcaagaaaaaacgacgctgaatattttctctcctgtcagtatcaggattcagaaaatgaaaccaaaacgatggtggcatttatcagaaaagaggatcttcccacaggggcgtcctcattctggtcactggcactgatgataaaacccctcatcgaacctgacggatacgctatctgcgaactcggtgatctttatggctttgtttcctgcgtcaataacgttctcgtcaacgatgttgtaggtaacaaaagtcagatcatgagtgctctgacaacatttcttgagtttaatgaaacaccagaacccggctggaaactataccagcctgaatcatgggatatcagccaggcactcccctcactcactctgtctgcgttgattgacgtaaaaaaaccgccgaaagaggcggcgtttactcgcgtatcccgaaaacgtcagttcatgatttatggcggaagtgccattctggccatactgctctggaacgggatcaccatgtaccaggaataccgggaaaaagaagctgcggcagaagctgcacgtcttcgtctggcaaaagaaatggcagacaaacaggcaatacagattgccccaccgtggcaacatttacctgaaataaaaccatttattgataaatgcattgataaatgggatgcactgcccttatcgatcgccggatggcgttttgaccttgctgaatgcagcacatccggtaatgacgggctgttacgcacatcatataaggaactgagcggcgttacggtcgaggacttcagcacacggatacgagaaatattccaggggacaaccacagcaacttttgtattgccagaaggcagcgccgggggattttctcttcctgtcagttttgacgtttcgcctgatccaattaccccggacacattgccacaggcaacagatattcaggaacgcctgacaacatttgcacaaaaaatgaggttaaaactcacctggcaggaaattgaaaacacaaaaacagatgaagaaggccgtccaataattctcccgtggaacgagtatgaattaatgattcagaccagcaccccgccttcaatacttttcgctaactttcatgaacctgccgttcgcttccagtatgcaggaataaaactggaagaaggaagactgaattatgagattaaaggtgcattctatgttaaaaataattaaaccaacgattatttctgtctgttttttcagttcacttgcttacgcaacagaatctgaaagcacaccaaaagacgaaataaaatattcatctccgaccattttacaggtagagcagattcaggctgaaacggtaatttacgaagcaaagctggcgcgtcagaaggctgtcagtgaattgcgtaatcttgatttgaatggtgtagcgtccgcaacgccagcaataacgccctcttccgggtattcttctcttgcagataccgatataccagcgcaacgtgtagccgctaaatcacttcgtgttattgaaatatttggtacaccacaacaaatgtcagcacgaatttctctcctggacgggtcagtaactgatgtcaaggtcgggcaaagtattcctggtacttcttataaggtggcatcaatcactggtaatggcgtctggattcagaatggtacagagaaacgccagcttattctttaatgctattgaaagagacgacacataatgtttttttctgacgcagactatcccggaaaagatatttctgatgttgtatacgtcagtatatctgaaaaagacgataaacctgttcaggtttatatcgctgataacagtaaaggacagcgtgctgttcaggcttatattggcactctgaatgttaaatatcccggacaggtaaatataacctcgacaactcttgatgttatcgcatcccgctaccaggacagcgaaaaaaggtctgattcaaactcatcacaacacttaaacagcaaccaggaaaaggtcattagctacctggcgaaagcaaacaaactgggaagttccgatttgcacatcacacctggtcgggacggctccgagttcacttatgtcgaagcacgcgtgcatggggaactggaaattctggatgtcatcccgcgtaaagaagggctggaattgctgggtgctgcctattctggaatgagtgatgttatcaaaggtacgcagtttgaccctgcaataccacaggatgcacgtatcgcagagaattttctgaagcctgtaaatctttttggggcgcgctattcgcattatccgtgcgtgggtggtgtgtacgcggtcttccgcctgattaaagatgacagcgaggatattcccactttcgaagaacttggctacatgccgcaacaaatccagacaatcaggcgaatgttacaacgcccggaaggaattatcgttttatccggccctacagggtccggtaagtcaacgactctgagaacggcttcagaagcctatctgagcacgtttggtttcaaccataacgataatatgcgtctcccccgaaaacgccttttcaccattgaatcaccgccggagggccgcattcccggcgcaatacagacggcagtcagggattccgtcgatggctgggttgacgcgattaaatccgctatgcgacttgatccagacgcgatactgaacggcgaaattcgtgatcacgcatcggcattagcagcaatcaaagcctcgatgacaggccaccttctgttgacgaccttacacgccaacgatgccctgaatattattgagcgccttgaaatggagaatattcaggccaggctgattgcagatcctcttctgtttatcggtctgctgagtcaacggctggtacaaaaactctgtccttactgtaagcgcacttatgctgaaatggcagacaaactgagtacagaagaacggaaactcattgaggaaaattgcctgccggaacaggtccggttgcgcaatcttgacggttgcgagcactgttataaaggcgtaacgggaaggacggttatagcagaagtcgtctcacccgacgcacgtttttttcagttatatcgtcagtccgggcgtctggaagcaaaatcatactggcactatgaacttggaggaattacccgtaatcagcacttattacacctgattaatcatggcctggtagatccgctgtccgcacacttcatatcccccattgacgaagataaatactcaatgctcccggaggggacatggcgataaaagatatatttgagaaactcaattcgatagaaattgatttctctggaatatcccactggctggcaaaatacacattcaggtattccagaataagtttatatgaagatttatctggaatgttaaatgatggcataaatgtaaagcgtgctcttacacacctgattgatgtagaaacagactacgggaagaaaacggggtcttctgcaacctactatatttgttgtgagtgccttaatgcactgaataacacaggggctatatcttcagcattaaaaaaatatataaaggaggatgaatatcaattaatatccagcggtgaaattcgcggcgaccttgccggaggattagttcaggccataaaaattgtcagaagtcgttctgaaatgacaatgactcttgttatgtcgatgatttatccatccgtactggtttttggttgtctggcaaacatgtatatggtccacgataccataacacctgttttcctttctctcgcaccgaaagaacgctggacaagttctatgcgattactgacagatacgtctggtttcctgatagaaaacggaacgtatattctctgcttctgcatcgtactgtttttcctgatcagatattcgcttgcgcgttatacaggaccgggccgtcagtatcttgattacattcccccctggtcactttataaaacatttaatggtgtaagttttctcttcaacatggcctccatgttaagtattgatattcccgttgcaaaagcactggaaaggctggagaaaaacagcactcaaaacagatggctactcgaacgaataaaagaaatcaggagatatgttttacttggacagtcacttgcaatggcaatgaaaagttgcggttatgacttcccatcgaaattatgcattaacaaactattacttcattctgaaaatgctgacaatgcattgatgatgtctaactatgctgataaatggctggaggaagcaaaaggaaaagtcaaatcaacaggagtctggataactgtagtatccgcattaattgttttcgcatttattgtaatgatgattactgctctctacgatgtcagtaacgtcctgcaacactaatccctaatatttttaacctctcaataaataaggaattatttattatgtcttctattaatattttaaatatgcgttctgttttttcttctctttctgcacgccgtaaaaaagaacaggacaaaggggcaacactgatggaagtgttattggttgttggtgttattgttgtacttgcagcaagtgcatataaactctattcaatggtgcaatccaacattcaatcatccaatgaacaaaacaatgtcctgacagtgattgccaacatgaaatcactgaaattccaggggcgttatactgacagtaactatattaagactctctacgcgcaaggattactgccatccgatatgatcgcagatacaactggcgcaagcgcgaaaaacccgtggggcggctccgttacaatcacaacctcttcggataaatactccttcaatgttgttgaggccagcgtaccgaagaaaaactgcatggcaatggtaaacgccctgcgttcttccagcgcaatctccaagattaacaacacttccacatcaactgtcgatgcggcaactgtttgctcatctgacagcaatacgctgaccttcagcactgattcctgatttttcatgtgcatcggataagcgccttcgggcgcttattttttccatgtttacaggaggagtattgtgcgttctgttctttatatcctgctatcatgtatttcatcattaatcttttcattgcaacccgcatattcagcgacaacgacccaatttgatgcctgctttgcacaagccgggcaacgttatctgattgatcccctgcttctgaaaagcattgccactgtagaaagttcactcataccagaccggataaatcacaacaaagaaaaaggaaaaatattaagcaccgattacggactgatgcaaattaattcatcacacatccccaacctgaaaaaacttggcgtaataaaagacaaatcagagcttattgataacccctgtctcaatatacaaattggcgcgtggattctggcaacacattttcagaaatgtggcataaactggagttgtcttggcagttataacgctggtttcaaagaaagtaacgaacagaaaagaatcaaatacgcacgctatgtctacaataaatacatggtaaggtaacttatgctaaacagcatatttaatacggcgatactttgctgtgcaaatatcgtctgtcaatgctacgcctacaatgaagtaaaattccgtttaaataaacttaatgtatcttataaaaccggcacagagaaatattactgtctgatactgacaacgcttgccgttctgtatctttcattaaaccagctatcactgattcaatctataatagtgattgttttctatgctttccttacattaatggcttgtatagaccttctttcatttctactaccacgcctttataccgtgacatttatcttctctggcctgttatatcagacatggaataacaatatattgtctggtttgttttgtgcaatgctgatgttcttcattatgctgtttgtaagactttactttgcatataaaaacggaacggaaagtttcggcatgggagatgtgctacttattgcaggaactggcgtatggtttccaacgcctgagattgcctgttcaattgtatttattgccgttatcggcggaattattttcttcactcttggcggattaaacaagcaaaaaaaatatatcccattcggtccgttcctttgtggcggaatgtttgtttactcactcgtaccgggaatattattctgaggattaagagcaatgaaaaagacagataaaggtgtatctcttcttgaggtattacttgtcatcggcataatggtgatggttatccctaaagtttatgaaaacattgaaaaccatctgaataatgttcgctggcagaatgcagcagaacacgcaaatacctataacaccgctgttcgtaattatgttgctgacaatgcatcaacactacttgctggctctttacccaaaacaatcacgccagcaacactcattcagaaaggctatctgaaatctggtttttctgaatccaattttggacaaagctacattaccggtattgcaaagaacagcaaaacatcccgtctggaagccctgacctgtagtaatggcggtcagtccctgtcagaagccggaatgcgctcggtagcaagcatgattgaagggcttggcggctacatcaacagcagcaagcaggcgattggcgcgggtggcggctggtctgacacgccttcaaattacgggctgaactgcgcgaccgggcatattgcaatggcacttgttggcgctgatttgcaggaaagcgaccgtttgtatcgttactccataaccaatcgtcccgaccttaacaggatgcatacggcgattgatatgaacagcaacaatctgaacaacgtcggcactttaaacggcaacgccgccgcgctctccggcgatatcagcgcacgtaacggtacgttctctggcgcaatttcaggaaatacagccacaaccaacggcgatatcacttcgaataatggctggctggtcacaaaaaacagcaaaggctggatgaacagtacctatggtggcggctggtatatgtccgattcgtcctggttgcgcagcgtgaataataaagggatttatactggcggccaggtaaaaggtggaactgtacgcgctgatggacgcctctatacaggcgagtatttacagcttgaaaaaacagcaacggctggcgcttcctgctcccctaacgggcttgtaggccgcgacagtacaggggcgatactttcgtgccaatccggtcggtggtctggtggcaataaagtgaactactccgcctgtaagtggtatcaatcatctgtagcaatgaatcacttcattggcgggaaaagtggaggatctatctactacaaacccattcaatgcccgaccggatttatcatgacaggtacacgcatgtatggcattggtgatggcgttgatgaggaacacgttgatgcttattgttgccccttcggttaaatcccagcaccaggaagattcaggcatgtaacagtaattgtgccgccggactcataatttccccacgcataattattcacataccaaaccttgttttggtcggagtatacctgctgaaacccaccaaaaggcgcaccattaaggtatgtccacgaacagtacgcatgtacgccaatgctcagatttcgggtgtttttcccgatattgtacgtactggtagtgaagttcacttttgccgttgtccagataccggattggcactggcccccgtgccaatccggtacgtggagaagggcatcaggtagcactgttctgacaggaaaaatagcaaatggacaacagatcccattgccatctggtttttctgccagccagtgtacctggagtgtcagtaatgcagaaaatccgcacgggtggaagccgaattattttgcggggtcagttgcaacctatgatgccaatcgaattgtgaaatgcggcttctatgacgaatacaacttttatggcggtactcaccgaactgacctgtcggggaaatgtagttacatcgtggtttgccagtgataagtatcgtcactggcaaatggcgtaaactgtaattgaaccattttgatcttcggtcgtgtcgcaactggcagtccatgcattgttgcctgaaggcatggaacgcgtgagccatataaatccggtatttgatctgcattgaccgcctccaccaatgactttcttgccagatggacatgttgccgttgctccaggccaacgccacgcagtagctgaagcggtaacaatttggctatcacctgcgccaatttttttccacgtaccggattggcacggaggccagtgccaatccggtgtgtggagggcattaggtggaaagctcaaggttactcaactttccagcactggttacttggggcaatttgacttttgtgccattgccagaatgggaaatgctgaggattctcattactgccaggtagtcgagagtccatctggttcacgaaaatggtacaaatacgagcacaagacaggttgtattgcgtcctgtgtaactctcaattaagtttggtatccaaaaactgaaaatacccctgagccacaagagtagttttgggccggataagaggtgatctgataagttgcgccagcagggacagcaaaagagatgaatgctgtcttcccataagatgggttgttgctcgcatttgtgctaatcaatacccctgcaacgtatccctgcaatctggatgtgttagcgcaatctcccccggcggaaccaccattccctccagaggcgtaaacaaacagcgtaccacttcctgtattgcgaccagtaaatgatcctctgtgtgagccaagattactgtaactaccgttagaggaaccggaagttctccacacaccggattggcacggtgatattgcatttcgaagcaagaatctctaccttccccccttttttgtctggaggggatatgtttcagaaaatcaaaattcgcaaaatgacaatcagccgggcgctggacaaatacctgaagacagtatccatccacaaaaaaggccatctacaggagttttatcgcgtaaatgtgattaaacgtcaccctattgctgaacgctatatggatgacattaccactgttgatattgccaattatcgggatcaacggttggcgcaaattaacccacgaacggggcgtcaaataaccggaaacaccgtccgtcttgaacttgccctgttgtcatcattattcaatatcgcccgtgtggaatggggaacatgccgcatgaatcctgtcgaactggtcagaaaacccaaaatcagtagcgggcgcgatcgtcgcctgacttcaggagaagaacgccgactttcgcggtatttcaaagaaaaaaatcaggctctttacgtcatttttcatctggcgctggaaacagcaatgcgacaaggtgaaatcttgtcattgcgttgggaacacgtcgatctgcaacatggggtagctcatcttccaacaaccaaaaacggtgctccacgcgatgttccgctatccaggaaagcccgtaattacctgcaaatgctgccgacacagcttaacggtaatattttttcttatacctcttcgggattcaaaagtgcctggcgaacagcacttcaggaactgaagatagaaaacttgcattttcatgacctccgtcatgaggctatcagccgatttttcgaacttggtacattgaacgtcattgaggttgccgctatttcaggccatcgctccctgaacatgttgaaacgatacacacaccttcgggcttatcaacttgtcagtaaactcgatgcccgacgcaagcaaaccagcaaaatcgctccctattttgttccctacccggcaacggtcgagaacagaaacgggcaagtcgttgtgactctgagtgatttcgacctggaaacaagcgcagccacaaaagaacaggccatatttcatgccagcgtgttgctgctacgaacactggcacaagccgcccagcgaggagaacgcgtccctactcctggcgaacttcctacaaacattgatgaacgggtaatgatttgtccattaacaaattagaggattcacttatgatagaacaactacagagtgattttttattctggatatttatttacttcctgatagtaggtttgcttatcagaaacattcatcttaccagaaaaattaaatccatcgaaaaaaacaaaatgttcccagcggaggaatatgctgtcctggacattgaacagcatatgtccaataaatatattgggcggctagtaacccgttttatgaagagaactaatggtgcacctttgttaattgtgtttccagaatacgataaaggagacaacaatgaagacaaaaattctccaccattccaacttgtaaaactaacatccaacatcaacaatattaaagaaatttattccaatgatgacttaaactgttttctgaataatatttcggcacaaaaaaatttatatacaacgcactctggacctagccaggcatggattgaacatgcatatcctttgcaacaagtaactattctcttacaaggcactcgtcatagtgaaagggaagatataatcagtcaacttgagattattctttccagactaaaaaatggagaaaatacaggttttgagcatgacgatgattttggatattcatttcagtatgatgccgcagcagtaggaaaatcatcatttttcgatgaagcggcaggaagaaaataagaataacgctctatccattgcacagacaaattaacgttaatcttttatgaaaatcttattaacaatatttatttatctgcttaccgcttttcagtctgcaaatgcaggtggaataccttatacatttaaccagaaaattcttcaggggaaagttattcgcgttctcgatggcgacaccatagaaattaaaacactacccgcaaaaattgttgtgtatgaagttccgatccgagtccgattgataaacatcgatgcccctgaaaagaaacaaccttttggacgctggtcaactagtcagcttaaaactctggttgcaggtaaacaggtgacagtctcttattcacataaagaccgctacggacgcattatcggtcatgtgttcacgacgaacggcacggatgccagccgctttatggttcagtctggcgctgcatgggtatatgaacgttacaacgtggatgagtcattaccggctctgcaacgggaagcgcaggaacaaaaacgtggtttgtgggccgatgcaaatccggttccaccgtgggaatggcgtatcagaaattaagggggcaagaaaatgcattcttcttttggtttgccatgattctgtctttttatctttgtgcaatattaaaggcttctttttaacagggggcggcatgtatgtaattaatcaacagacaagggacaataatattcttacgttgcatgatgtttttaaaatctatcaaaatacaggggggcttcgtcttgtaaaaacagaggagaatgaaaagtacatctccattatcatttgtggcgtttttcgtattagaaaaaacaaaaagaataacaaaatcactttgtggggatacaagctaagagataagcacactggggtatggaccagaagaaattcatttcctggtaagatttttttattctggtctaaaaaatctgcatacgacatggacgactggttaaaatatgcgattagctacatcatcaaatcattgattgaggctggatattcaattgaagacaaactctatttgttacgcattggagaggaagaggaaaacagcgagagtcgttatatttccacactatatccatccaatgtatattactcatatgagtatggaatacatgacattgttcattgccttggtaaaatagcatcattcaactacccctataatacacgatatatcagcagacatattttactcgcagagataaaaaacaaaatttatcagagagcattaaaaattataggggtggataatgaatttaatgcttcaaaagcattgagtaaagctatatggataatggtagataaaaagatatttgcacaatatgccagagcttcacattgttcgatagcttacaattcaattcgtcaggcattatttgaggactatctggatttttcaaagcgaatccatattgtgaatgatatggattttttcggattgtggcctatggttggtcgtctaagacaacaacataaaaatggtcagtttatactatctggaaagacaaaagagttatatgaaaaaatcagttttccctgcaaacttagttatggtgagttcagaagtttacgacatgttagtttgtcattagtatatgctttaaatgataaacatgataatgcatcattcagatttacagtcagattattacgccatccacttatcaagaactatcctgtgagagcaatttactggattatcgattatattagcattcgagcttactcagaaaaagaaaatgatatttatcgtatatgctcaaaatggctagaatatcatcgtgatttatttaaaaacattggcttttatgaccgtaatactgaatccaggcaaacatcacgctgggaaatggaaacgaatcagttgtgtcatgcaattgactggttgttagcagaagaacggttaattcataaaaaccaggagtggccttctttctggagactatctgatgaatggacgcgacaagtgaagaataacgttattcccgtaatcccaaaatggaaaggaactgggataaactggcagaaagttgataacggtgtaaatgaattaattacatttgatgctctgtgtcaggaaggtcaggagatggaacattgcgttgccagttatgcagactggtgtgcatctggagaatatattgcaatttcagtcctgatggataatgaaagagccactcttggactttcacgaaaagaacatgatttaacctatcagtttgaccagatgagaggtattcgtaatcaggctgtttccagaaacatgctaattaaaggcaggcatattttaaaaataatcaactcatcactaaaaagataatgagtcatcgcatctcattacagcaccgatgactgggtgtttattctttctgaatacaaaaactgactgaaagataaggaaagaaagttttcttacctgtttgtcttacgcaatggtgaactggttcaccatgaggtcaacaaatcagagcttctttgagaggtttaacatgcaatatgcattgcttgatggatttgaacgaaagtttttgctggatgctcttgaattcggtgttctgaaggactggaaagaaaatccggtaaaagaacttcctgatattgatgaatctgctcaccccttccatgtctgttatggtggatatttattaaatcctggtgtttcagattcagatattagcagaaaaataaaagaccagacaggattctggctggcagctattgatgatacccgcatggattgtcattcaatagcttattatgatattcacacactccctctgatttcgtgtggtcatcaaaagatagttccttttgccgcgttaataaaagctgatgaatgcatcatttcaaaaatttcttcgtattctggttttgccgtaacagcctttttgagaattaaagaccaggatattgcaactaatatacttaaccgtgaggggatttttgcttttaatggctgtgaacgcagattcagacatccagtaagtgaagataactggcaacaggcagtatcagaagaacgtgctatccgttgtgccaaaagattaattcaatgtaaaggataacaaaatgaaactttttatcgcagaaaaacccgcagtagcgaatgatattgttaaggcgcttggtggcaattttacccgtcatgatggctggtttgaaagtgataatactattgtgactaactgttttggtcatattatcgaatcacagccccccgaaaactataatcctgaatacaaagagtggaagattgaaacactccctttgcgtctttatcccgtaaaataccagcctgtagaaagcgccgaaaaacaggttaaaacgattattgagcttatcaggcgtgctgatgtgaccgaaattattcatgctggcgatcctgatgacgaaggacagctacttgtcgatgaggtcctggaatatgcaggcaacacaaaacccgttaagcgcgttctgatcaacgacaacacccttccggctgtgaaaaaggcgctggcaaatcccaaaaataaccgtgacttcagaggactctatctcaaggctctggcgcgttctgtagccgacgcgatatacggtttatccatgacgcgtgcttacacaatcccggcaaaaactaaaggctataaaggtgttttgtctgtcggacgggtccagacacccgtgcttggcctgattgtaaatcgcacccgtgccaataaaaatcataaatccagcttctactacaccatgaccggacattttcaacgcggcgctgatgttatcagggcgaactggaaacctggtgagttcgcaccgctgacagaccgcaaattgcttgataaaacctgggcgaatggaacagcaacatcacttgcaggaaaaccagccacagttgaagcggcagcaacagatgataaaaaaacggctgcaccgttgccctttaacctggtacgacttcagcagtacatgaacaaaaaattcaaaatgactgctcaaaaaacgctggatatcacacagcagctacgcgaaaaatacaaagcaattacttacaaccgttcagattgttcatatctttcagacgaacaattcagtgaagcaccacaaataatcgatgccctgaagtcggtgtttgatcagccaatggatattgatacgacacgtaaaagcaaggcatttaacagcgcaaaagtaacagcgcatacagccatcatcccaaccgttagcgtaccggacgtaaacgcactgagcaccgacgaacgcaacgtttacctggcaattgcacaacactatcttgtccagttcatgcctgaaaaggcatatcaggaagtatccgtcgccattcagtgtggtgatgagtcgttttatgcccgtgccaggaaaactacagacagcggatttgaagcgtttcttggtgtggaaaatgccggggacgatgaagcagaagtcgaaaatgatgattccgcttttgatcttctctgtaaaattcgcacaggagaaacagtgacgacaaaagaagtggttgtgaatgagaagaaaacaacgccaccgccattattcaccgaagccactttacttgccgcgcttgttcgtgtcgcagattttgtcactgatccagtgattaaaaagttactgaaggataaagatcgggataaaaaagacgaacatggcggtattggtacgccagctacgcgggcttccatattggaaacactgaaaaaacggaactatatcaccctggaaaaaggaaaacttattccgacagataccgggtatgcgcttattgatgctctgccggatatagctgttaatccagatatgacggcattatgggcggaaaaacagacactcattgaaaacggagaaatgaccatcgaacagttcgttgacgaactgtacaatgatctgataccgatgatcagtaatgcgaacagtgctgaaataaaagtttcccccagcgcgccgtctggtcagtcacaacgcctgtcctctccttgtccttcctgtggtaaacagattgttatcaggccaaaaagctattcctgtacaggatgtgaatttaagatatggaaagatttctgcggcaaatcattaaccgataaacaaattgaaacgttaataacaaaaggagttacaagtgaattgaaaggtttcattagtcaaaaaacaaacaaagaattttcagcaaaagtaaaactggttgacaaagcaaccgggaaactgggatttgagtttacacaaaaaagtaagaaataaatccagcagtagaaatcaaacatcgttgtagctactataggacaaggatgttcttcaggaattgtacaatgaaaacaaaacaagactggctctttcagttaagacgttgctcaacactcgacacacttgaaaagattattgaaaaaaaccaaaacagcctccccccttctgagcttgagtcgtttaatgccgccgccgatcacaggcttgcggaactcacaatgaataaactctacgataaagtccctccatccgtctggaaatatgtatattagttttcatctattaatattagatgtttgatcgacacaaacatcagcaatccctatacacctttcatagaatgaattgaaccctgtatatagcctgtctgaaatggatatctggcaggctatcttaatagtgttataggtggtatgaatgtttttcctctacgagacctacaatttcttctactacctgataaagttaattgtcattcagccacaatatatttgtgtctatatgatattcttttttttcaatgcagggatagcatatagcatcaccaatgatatcgaggatcaagtatgtcgatggcttttattcgtaagtatgttacatgctctgatgattccccccgcagttatcatgccacttatcatgccaccacaggaaatacttcaggaaacagagaaaaggcaggaactacatgaatcaatacccaaaacatgcaaattaaaggcactggatgctcaacaaggtggtttattcggcgttgataaagatgaatgggtattccctgacaataaatcattctatctgcctgaaaagtaccgtccagaaaacaggattacggaactagccatgatgaaagaaggataaagacctatgaagatattcaaattgtttgttctttgtatcccccttctgtttagtctttttttcgctggctacggcattttgtcaaaaaatccatttgaaacactaccgtgtctgtccgccagtgctttttgcctttttctgtttgacatactgaggcgatcatttatgaagtgaggtgtcttgatgttaacgttgaggttgagaaagttttgttggttcttataattatagaccggattaaatcatgaaagaatacgaaaaaacggctttaatatattccttaaaggaaagcaatacattagttcttcggattatactaatctctattttagttgtcggggtgatttcaggcgcgatatacttatataacttggcgatctcgttgtttgattcaaacccaacgtctgtgcaattcaccttttgcggagtaggctgttttattgctctattacttcaatggatatctaatgttgatgcaaattacagagaaagaattggggagcaaccaagtacaataaaaaacattgtacaatatttatttgcagccattattaccattagtttcattacaatggcattaacagccatattagtcttaaaagactcgtccaacatatggctcaacattacttttattgcattattactgtccatttttgtagctattatttctgtttggggttgactttttttcttaaaaagcccgaaaaccgggcttttttcttaattagtgcatgtcctgtgaatcgtcacgctgctgctgcgattcctgatgatcttctctggcctggacaaattgttttccaagagcatcttctgccatttcacgagtgaatccgtgattaagcaaatcggattcggccttctccctttcgaacttcagtccttcccctctgaacttgtcctcaaagcgatcaattgcctcaagaatcttgccgtcttccggcgtgcaatcccgtccctgtgctttctcaatttcatgacgctccacgcgttcagcatttttcattacagcgtcaatcccctgagaaatatgttcagactcgacgcgataaatgacagtatcgcgcttattgagatcatgtagctcgcattcaacccggccccactcaatagcatccttgagagagctgaaatcttttatttcagcattcagaccttcatgtgttgagaaatagacataatccttctgttgttccagtttattcacattttcaatagcccttgtactgaaatggatacctgtaattaccggaacacgagccgatgtttggtcccccgttaaaacttcagaaggtgtttttccagtgatcgcggcaaattgctgctccgtaacatccactctggcaactgcatcaccacgctctaagccatgcttaccagcgaccgcaaggcgataaagaccaccttcccccctggtaatttccgcctccacaacgatatccccattgcaggaactgaactgagaacggtctttaaccaggaagttttcaagcccggagatcatatgctcgttagctgaaatactggcgagtatctcttctggtgattctctggacgaatcccccgcctgttccatcactgccatattagcgtcattaacagcgtccttaattcctttaaaggcgatttcttctcttgttacaggtgtgattaagatatcatcctggttaagcccgtgctcctgaagcatcttatttttatattcagatgcgtcgtgcaatgactcaaaagtcttaatatcttcactaaactcatccttcgaaaaagaaaccgcatacactggagtacggtattcttcatatgaattggcaattatttcaaatggcctatcaaacgttactaatgccccctctggataagaggataattcatcggttgagacagttttagacataagcacaacagtatcaaaaccatcaccatttaaataattgctttcatatttttctattgcagaagatttgctttcctcataacactgaatagccgcatctttagaatgaaagacgataccttcattcaaatcatggaagcgactaaagtttatacaataaatttcctgtttattatgcacctgcgcagtagcctgatcgtgttgagtagtaagctgctcctgaatcagagcctgtgttctgtcaatacctaactcattcacaattttgcaaaattcttttgcgtcgttttcattatcaaaactggcaacgtcaaaaatatcatcgctgtctccaggtacatgtcccagcacttcccaaatctcattttcatcgctatccagagatttcaaatagccaaattcaccatttgtgcctttactaagcatctgtgaatccagggtgtttgccctggtaataacaccaggatcatatgaagatgtggcctgctctgcgacctgtgcttgctccgcgacctgtgctttctccgcgacctgtgcttgctccgcgacttgtgcttgctcggtggcctgtgcttgctctgtggtctgtgcctgttcggtggcctgttccttcaatgcatcacctttctctattctggattcggactcctggctattttcctgtgtttccacctgctcaaacttattaccctgaagttctgcttttaattccagcatcatctgttgatactgctccgggcgtaaaataatcttcatgtcctgctctgcggcaacttcagcgcacatttttttgaaatcttcagagccggtaagtttgagtacaccaccaaacttttccctggaatactcaagcattattccgatctcttcttttgagggatttttacccgcaacgacaaagttccctttgtcggtaaagacaggcttttccgattcctgatcgcgataaacaatcctggaatcctgcttatccatcacaagatcttttagtttggtgttaacctttttcgcctcttctaagcggcgctgggaatccaccgctttctgaagcgaaagttcgggttcgtcagcagaaatggcgttgatttcatcgaagttgagatagcttttgagacgttcaagggctttcatttcatctttatccttatgccagtcagcatgatattgacgaataatgtgtcgcccatctgtgtcgagttcagaaagacgctcaagtgtggttagttttttgtaaacaatcacacccacggcaatatcacgctgttcacgtggtattaacttcaactcgcgtctcatctctcgcagatcattatacagcttgccacgctcaaacctgatagtatttcgtaatgttttttcagataaattcagtgagttaagacgctcacgagcttcatgatgcgtaaggcgtctgtaggttggatagcgcgtatatggcgtgttttctaactgctgtgaataaacttcaagcagaaaggatttcgcatctttccaggcaagattaatatgctttgtcagaaaatcagatgcgttcatattacgattccccacagaaaaccggggggaaccgtcctttgctgttctgattttatgctgcgctggaataatattaaaacgctcggcggcagaagacagaaacctgacaggatcaatatttctgcgaatttctgccatcgttgtaatttcgtttttctctgccgcctcattcagagtctgaaacatcgtttcacacaaaaaagaagagcgttcaagactttttattcctgactctgtgaattgtctatcataatcccgtcgcacatcctgaccaggatgttctctttgcggtaattgctctgccagatcacgctgcgaaatatctgacaatacactgatagagtcgggtcttgtgaatccattgattccgtaaaccataccgcgttggggcatacgtgacaatccgactgttgcttcagattgacggattctggcaaactttttaggacacgacttgtaacctcccgctcgtcctgacgtttgctgagaatttctttcgttaagtttttctcttgagtcatattcttttatcctctctttcagaaattcaatctgctctgcttcagataaacttgtatagtccttacgaacgctggcgttgagaaaaacatgtttaatctcgtgactggttttgtttacccaggtattgagacgtttttctatttgcttaggcgtaggtttttgaagagtcaactttccctcttcaatatagtttttacgaaacaacgggcttttcagattagtgaactttttatctcccggtaacttaacagcaatatattcactggcctttccttcatttcttatcctaacctcaccatattctgcaacaatctgtttgaatacagcataatcacttactttttctttttcaattcgataattcaattcattcttaaatgcagaattacgctctacatcaagatctgcttttactctctttaaaataacactataatcactattttttctcggaaagtccttcgggctggcaagattatatttattgttaatatgctcctgtattgcatctagctgttcgatagtatgacctttccctataaggccaacaggatcaagtttatctcctgtaactagattaacctttggaatgacaatatgaatatgaggctttctttcaattaactctcctgtactattatcctgaatatgccggatttttggcaaatgtgcttcagcatagaaagaatattcttcaggatgataagcattcatcaataattttttataatcatccacaaccgcctttaacatttcatttgatacgtgactttcatgaaaagacaacgtaatgtgcaaataacggtcctgtttgttgtcttcaatagaattgataatcttatctgtagtctggagatcaccatcaagaacaacacgatgatcaagttcatcacgtgtgtactgacgttctgctttgcgaccatttatcaggtaatcaacaataccgtcattaccaccaccatatctgacaatcatttggctatctcctgaaggcgatcacgaataccaatcagcacatttaaaatctttttataaagcgcctctgatataataccctttaaatgatctgagtttaagcggtgagctatctggttaatattattcccagcccaacttaactgagaaagacaccgtttgtattccgggatatggcgtttatctgatgtgtagttttttattttaccaatagtaagcagcctgaaaaattcagacttactaatttcaagctctctgattgctctgtcaaatggagcatactcttcttctgtaagtctgaatgtcacatgaacacttttgttggcttttttcttcataagtcctcaaggttcgtagaaccgcactagaacggctgcgccgttcggggttgcaaaggggcgtcccctttggcacaagcattgtaacatgcccggaacgggcttgtgtacaaagcttatcgtgcctgtgttttagaaggacaaaaaaatgccgtgcatacagcccacacaatgactcacataatcacccacaactcaaaacacacagcccacacaatcacccacactttaacccacaaaaaagaccacaaccccattgacaacccacaaaacaacccacataatcacccacacaaacggcgagcaaattgctttaaataaggtattatgccaatgtaggaggtagagagagagaggaaatgtaacaaatgaaaaagatcgagagtttattatctccaatatgcgaggctataaacgaaacaaaatcgaaatcaaaacaggctgtcttcaatatgtatttgcaaaatatacttgaagcaaagaaatattatacatgggagcaaatagctgattacataaacaacaacaccaagacagaactagcccaaaagacttatataaatatgacagagagggctaaaaaaagacaaaaatgcactgaaccaaaagaacaggcaaaaaccatagatgtaattgttcagaatgaagctaaaggcgatgaaccgagagggggggtaaaaggttttttttcaaacattagtgagaacaaaaaagaaatagagcacgatccaagtgctacgaatgaaaaatttataaataaatatctttaagtaaaggagcattataaatgaaaaactcaatcaatttcatccttcagggtaaaggtggtgttggaaaatcattcgcgaccgcaatactggcacaatactttattgatgaaaatcacatggataatatcgtagtcggtgacacagacccggttaatacaactacggttaaagtaaaaagattaaatgcagatttgatacaaatcactgaaaacagcaaagtaatacaatccaaattcgatccaatgttcgaatcgatgctgaccaatagtcagaatacttttgttattgacaatggcgcatctacatttttaccgttaattcagtatttcaatgataactgtgttatggacatgtttgaagatgtagaacaagacgtttatatccatactgttatcgttggtggacaagctcttgcggataccttgcagggatttgaagaactgaaagaactggttaaaggaagtaaggtaaaacttattgtctggataaatgaatttcagggtattccagcacttgaaaatatcccattaatagaaactaaattcattgaaaaaaacaaggatgtaatcgctggcgttgtggttattcaggacagaaaaagtgatgcctttgcctctgacatcaaagagctaacagaaaaatcactaacactgaaagaagctcttgagtccgaccattttggattaatggctaaatcacgattaaaacgagtcttcaatgacatttacaaacaattagatagcatctatgacgatgaatacggtgaataatatgagtacagttaatcagccagaattaaaacagcctgaaaaggctgtttccagtgaagatattgataattttattgttgatgtattcaaggagacagggcataaaatatcaaaagatgatccagttatttcattaatttttctgaaccaaaagatacaggaaaaattcagcaatgagttacaagctaacttcacagccctgtctgagggcttcagacaggtcgtttcatctgtagaaaatgactatattcaaagattcaagaatattgttgagacgtgcggcgatctggataatgaaataaaagaaaaagtagaagagggaaaaaacgatctaaaagaaacaagtgttgaggtaaaagaaaaattaacagatgatattattgaactcatatctggaattaaacgcaaccaggaaaaaaacaacaaattatatgaagaaaagttgaagtcattatctaaggctgtaaaacccttcagtacaagaacagccattgcaatttgtgccttgtgcacattatgcctgtctgcggcattttctggcgcaacctggtatgttgcacaacatgaaaaagaggcaagcctgcgcttctatgcaagagcttttcttgatatgaaaaaaataactgaagagagcatgagaaaattaccaaaatcagaccagcaaaatataaaactcaaactagacgaaattgattcaagaaaaccatagatatgaaaaggagtcactaatgacaacttttaccgacgacgacaagaaactaattaaagaaatcagggagcgaatcggcagcctggacgtgcgagacaatattgagcgtcgggcttatgaaatttctctggcatcgctggaagcagagccagttatgttctgtatatcaggacaaaatgtagattcagaagaacatgtatcaaccagcaaagcggttgttgatgcctgggttgaagaatggaatcaggttgacggaagtcctggcgaaccactgtacaaaactatgccactctactgtcacgctgccttgccagcgccggtagtgcctgaaggactggttaaagcggtgcgtttttatgagcaggtaaaaaatgagaatccgccagttgggactggtgcgtggaaagacgctgttgactgggtgctcgaagaggcttgccaggctgtaaatacagacatcaaaggatgaacgatatggcaaccaacaatcgtaaagccaagatgctaatttcccgtgtatacagactttgctaccccagccagtggttgagagttagcaatcgccgtgtggtgttgttctcattttctggaattgccagagagggaatcaaagataagcgcagcgcggcgcaaaaccgctggaaaaacaacttgcgcactaaaggagcctaatatggctattgccgcaagttacaccatgcatctctactgtgattgtcgccagtgtacaaatggtaaatatcagtcgccagacttcggtgagtatatcggtacgtcatgggctggctgtgcaaaagaagcacgtaaagatggatggcgaataagcgccgacaaaacacgtgcttttgcgcccggacataaagttttgaggattaacaaatgacaacatttaccgacgacgacaagaaactaattaaagaaatcagggagcgaatcggcagcctggacgtgcgagacaatattgagcgccgggcttatgaaattgctctggcatcactggaagcagaagcgccaaatttgcctggtggtttcacaattgaagaagcaaaagaattacacgaaaatctggtaaaaagtcacgtaagcaaggctttaagtggcgaaaaaatgaaaaaagaaaatcgtgatgccgatttgcgctggattcatggcgtaatagttcaggccgcgtggtttgtgaaagcatcactagggcagaatgcatagtgcgtacctgcttttctcctggcaacggtggatcttccgcttcctcgtcactcgctcgctatgctcggtcgctggactgcggcgagcggttagctatcaaaaaaaatccccgcacaacgcggggatagttttatttatatgcaagttcatgacgtgccgcctgagccagaaaatggctacgatctttgtatacgccgccactttctctcacatatccatcaatacgacgaatcaatacatcaggcaatgaaatattaatacgttgttgtttgccctcaatttctgacaaatcaacatcaattacaaaccagctatcacagtggttataatttgggttggcggaataagtcaaacacccttcatcatgaatatcatcaacagaatgagcaccgcttattaccatctcttccacgattgctaatatcgcttcacgcgccattgcgggtatttctgcctgagaatcagcagcagaaacacatccaaaatcaaagcaatcaaaaaccggaacggtgataccgtatgctgtatgatcatctttcggtgtttcgacaccaacagaaaagaacatggctacctccaaagtcggcggggattaaatccccgccatttttttgatcgatctgacagtacctagcggcaagtcctttttaggatgaggaacaggaaaagtttttcctgttattggcgaccaccatatctggtgactgcttgccttatgccgtttcaactcgcaaccagcagctatcagttctttcaacaggtcagcagatttcatatgtcctccctaacctgaaaacaattatacacacgcatacacacaaaagcaaattatttcattcgtatgacttatgaaacacactgtaaagacagttcaatctttacagtgtaaatcatttatccagttttatcgctatgcatgtgatacatagaaaatcatatagtgttttactatatgatacctgattgacacttttaactgcacatctcatcatttacatcgtaaagacaaacatagctttacaatgtaaagctatataattaaacactccgtgtccctgataaggaaaaaaaatggctcaaccaaccccagaaaagatactggcaatcatagatgatcatgatcgcgcacaaaaaaaacaacgcaacaaaaacgtcttcatttatttatgtctctgcttggcaattattggagtggtcgcgcattcctttatatcaacgtttcgtcttgatggtgtagccgtccttacaattcttttgggcgtgtcagcaatcgcattttttctacattatgtagaatcagggaaaggccagattcttagcagtgaccgcatattgtccatactcgctcaaaccaaagattaccccacaattcgacgtaaagttgttaatcgcttgctctccggttcaaaactcacgggtaaagatgaagagtacatattcagtgaactgaaaaaggctgaacaaagcaacgaacgtgaaaagagattgcaagcaattaaagagtatacatcgtaatacaacgtaaagcatcacttgtaaatacaacacactacatcgtaataccagaaaacaccaacgccagcgagcaacaaaaaggggcgattaagcccctgcgcgatgattaatgacttctttttccagtgcctagctctggatcaagcctgacgttaaacacacctttaaagggcgcgtcaggctcctttccgtcctccacacaggactgtaaatacaaatcaaccgatgttttaaattcccgttccaggtcagctaatgtttctgcctcaaaagtcaccagatctcgaataaatgccagctttccatgcaggatattattttcaaaatccggctcaactgtacctaaatatcctttatattttaaatgtttcataaaaccccagcctctttcaagaaaagttatcagatagaagggtgaaagaaaataccagggagcagcgaggccacatacccctaagcgcagcgcaaccgccggaaaacgcaccacactgtaaagacaataaaatctttacaacgtaaagctaactatgtaatacaacgcgctacacattgacatcctccacgccctaaaggacgtggattcctacgacgttcaggctgtcgcctgaatcatttcggtgggttcctgcttcaacgagcggcctgactgcaccatctctccacaggcaagaacggcgtgccccgccgctaaaatgttacgagcgccatttacatcggcgttcgctgtatatccacatacctggcatctgaattgactttgtgacaggcgattttctttcgctgtatgaccacagcacgtgcaacgctggcttgtgtacgctggcggaacagcaagcacctgaccgccacgccagagctgcttgtactcaagctggcggcgcatttcataccagccctgatccagtatcgaacggtttaaacctgattttgcccggacattgcgccccggctggctgaccgtacccgctgctgactttgacatgttgctgaccttcaaatcctcaatgactatcattgcgtggtttttgctgacggtcgttgtgactttgtgaaggtagtccctgcggatatttgcgatacgggaatacagtcgctgtattttgcgtttctgcttctgccagttgttgctgaatttgaccttgcggcttaactgtcgctgaagtctcgccagcgtcttctggtttttctgaaaactgtttacaggatcaaaaatagtgccatctgacagcgtggcgagtttagccacgccagcatccagcccgaccattgatactgaagggtgaaccggagttgatacttcactttctgtctgaatactgatgtaccacttaccgcaggactgactgacagtgacatttttcacaacgcccgtgacctgacggctgttccggtagcgcatccagccaagtttcggcagaaaaatacgactgttttcctgatcgagcttaacgccctgcgggtagcggaatgcatcattctgtccccgctttttgaatcggggaaaagccgcccgcttctggaagaaatttttgtaggcccgctcaaggtctttcagtgactgctgcaatggctgtgatggggcatctttaagccattgggtttcagtggcatttttccactcaaccaaccacgaggccatccttgggtaaggaatatatttgttccctgcctcatggttctcattctgaagcgccagagcacgattgaaaacgaaacgacatgcgcctgcgaagcgcctcatttctcgctcctgttgaccaccgggtcttaactggaatttaaatgcctgtagtcgtttcattcgaccattttaaacaaaaaaagccaggtggaaaacctcgccttatatcctcgccctgaaggacggggttttacggcgcactggataagaaagggagagcattacactctccctatatatgactcaaactaaagcattatcccggttatgcgcccaccaaatgatttcgctaataatccatgcttctatcgcgggtgtttttacaggttccccatttacaatgcggtttgcaagctctatcatttcacatactgacatttgagaatctccaaagatgcatctgtcatttggtaacaggctgccccacagcctgttaccaaccccaaattagtatttgctgattactttaccctccttaatcatttttattagttcctgttcagaatattcttttccgtgttccaatgtggaatatatatcgccaatagtccatactccacactttttaatttctgcatttagccaggattcatgcagaataaacaacggttcgcaatcatttcctttttcataaacataaatagattcggtatcatttccagaatcagaagtaccaacgactttttctatatcgaaatgtttttttagaaaagttgtgaaatgcattttcatgctcctgccgctgagcggctttggtggttggggaccatcccctcccgatgtgtttataataggtcagaactgacctattatcaagtatttttccctccattcttcaaaaaaaacaccatcaaatacatatagttatattcatgtgatgcccgacagggcatggaaggggcgaaagaaaataccagggagcagcggggccacatcgccccgaagcgcggcgcagccgctgacgaacataccaggatgcacagggccatcccttcgccctgcaaagccagaacagaccaacaggccatgatcatgctgatttgcgccgcagaatgccgcagttagcgcgagcgacagcgagtttacgccgtcctggtgcattacagcagggcggggcgctgtactgcgcgtgtgagcgtcagcgagctacgggcgcaattgctcattgttcaatgcaactggggctattaagtccagccataaattcagttatggtttttgtagcttattccgtgatttcgtcatacgttaattctattttcatcttaatattccttaattacttccagaatcagaattctttttattccttttacaaagtacataatcagggtgttctccagctaaaagcagaagaaatttaaactctactggtgtaagtgctgtaccgcttgcagttccgacaggttcttctttgcgacgccaggtacgcggactcatgctaaatatttcggcacattctttctgtgtcaggccaattttttgccgcagacgtttaatgttttctggtgtgttttcatttggcattttttccctcactcatttcctgaatcatcatagaaacaatttctttatcattctctcttaatccgtcgctggcaaagtcgatagtgtcgaatgccttctcatgaaaaacaagatcggcaacagttttcaccgttgctttcgtttttcctaaagtcgcagacttagaaaaagtttttactcgcttcaccagatgaaacgtatcaccttctttattcagataatattgtctgtcaccttttcttatcttcatattgagatagtctccccttttaacagtaaaggggcatatagcccctttcttttaactttttccggtaatcaaatcgacatcttcctgataaagctccccaagaaccggaacaacgccttttttataatcacggatattatggcagtctgtaaaaatgacgacataagcctcgcctgttttttcatgtttaaggcaaattgtgcaaagcgtcacgcgcacaacagaaaacacatgaccagttgtagagacgatagcaggaaaagtagattgtttcatgtttaactcctgccgctgagcggctttggcgattgggggccatcccctctcaatgcattaataataggtcacaaatgacctattatcaagtattttctagacgagctttattgaaaaatcattttcaataaattcatctaacatctttaatataccagctttatttacgaaatcatcctccataatttcgatacttgctgatatttcacatgtaaactcaatgctcctgtcaaatcccgcaatcccagctaatgcagacagcatatgataattatcaatatttatattaccaataagaactttcatttatcctcctgatatggggggaatccccccatattaaaaattacaatctggttgcaagtccggtttgttcattaaataaacattcaagctgatcacaataaatattatcaaattttgatatttcttttactgtagctccacggacacgggaaaatgtcaccaggtatgtatcagagaaggttaatttgattttaaccaaattaattcccttcattgcaaaatttgaaggtaaacgaaagcaaagaccagactcaccattttcatcaaaacaggcaaagttctttgcgcctgtcatagcaataaagcggtttccaccaagctgattaagaatttcagtagcaacaaatttggcgtggttttccatttttaagctcctgccgctgagcggctttggtgattggggaccatcccctctcgatgtgtttataataggtcagaactgacctattatcaagtattttttcctcctttctttaaaataaatatcgttaaatacaaatatttacattcatgcaatgcccggcagggcatagaaggggcgaaagaaaataccagggagcagcggggccacatcgccccgaagcgcggcgcagccgctgacgaacataccaggatgcacagggccatcccttcgccctgcaaagccaggacagaccaacaggccatgataatgctgatttgcgccgcagaatgccgcagttagcgcgagcgccagcgagtttacgccgtcctggtgcattgcagcagggcggggcgctgtactgcgcgtgtgagcgtcagcgagctacgggcgcaacattacattgctgcattcgcctggcattctccacgccttgaaggacggagttttactgcgcaccagataaaaaaaggggcgattaagcccctgtattcactattaacaatttaacatggttgcaggggataccccctgcaactattttcttagtagtatgatgtgaactcgtgtttttcttccggtgatcctttatatgctgtttcgaatgactcaatttcaattgctggcgtactgtaataatcacgcactcgccgttttaatggctcaccacagaaatcattgagtaatggggtcttatatccgctcattgaatgagtccgatgaactgaagcgcgaatctcctggacagttacggtttttttgccatgaacagaaataacctgatagaaattaacgttcgtttgctcatatccccaggaagatacaaacacatcgccaacagaaacagtgccgttattaaaagttaatgttttcatttttatctcctgccgctgagcggctttggtggttggggaccatcccctcccgatgtgtttataataggtcagaactgacctattatcaagtatttttccctccattcttcaaaaaaacaccatcaaatacatatagttacattcatgtgatgcccgacagggcatggaaggggcgaaagaaaataccagggagcagcggggccacatcgccccgaagcgcggcgcagccgctgacgaacataccaggatgcacagggccatcccttcaccctgcaaagcccaacggactgacaggccatgatcatgctgatttgcgccgcagaatgccgcagttagcgcgagcgccagcgagtttacgccgtcctggtgcattgcagcagggcggggcgctgtactgcgcgtgtgagcgtcagcgagctacgggcgcaacaacacaccaggcaaaatcgcatcctgaaaagttaccctgtaacatacacacaatgtaaagcgcaaaaaacaattacattgtaaagacacaaacatctttacaacgtaactataatgaatacaatgtaaagacaaataaacctttacactgtatatccgaggtttctatggggagagcattacttgtcgcatcagataaaggcggtgtaggaaaaagcaccacagcaacaaacctggcttcttatctggtaaataattcacgaacggtcatcattctgaagaccgataaaaacaatgatattcttagctggaacgaaaaaagaaagcagaatggcttattaccggttcctgtttatgaagagtatggcgatgtatcagaagtcattaagcgcctgaaaaaaatatgtgaagtgctgatcattgactgtccagggcatgacagcaaggaatttcgcagtgccttaactgtagctgacattctgcttactctcgttaagccgtcttcagatttcgaagcagaaacgctgactcatgtaacagaaaaagttcgcacagctcaacagatcaatccagacctgcaaccctgggtacttttcacgagaattaacacgacaaaaccacgccacagaaaagcagcgattgatctcgacaagttactccgggagaacccggtgtggatacagccacttcgtacacgtatttcagatttagatatttttgaagcggcctgtaatgaaggcgctggcgttcatgatgtacgtcgcgcatccagcctttctacagctaaagcacaaatagagcttttggcgcaagagttaggcatcaatccctaatggatgtaatacgacagctttacatcattagctttacacagtaaagctaatgtaatacacgaaaggtgatataatggctcttgacttgaaaactccggtaataccaggacaaaaaacagaacaaaccaatgcagacacagcccgattcatcaatgaagctacccgcaaaaaatcgggagcaactaaagtgaccaatgtccggcttggggacgtttacgaagatattctggaacgggaagcactgcgaacaggccagacaaaaacagcaataatgaaagcggctcttgcagcttacgaacacggcctggacgaaaacggaaaaaatcactggattctacagtcagccaggctgaaatgataaagcccttcggggctttatcccttacgttttaattgtttcttctcgctggctttcttacgggcatcgagaaccagttgcgcataagttgcgtgtgctttttttactgtaccagcaggtttcccgtaaaggtcgtaacgtgttgcgcctggtacagtacaattctgaagatattgccaccggaacgtcatcacctgaaccgcacaattccactcttcaatcgtcagatccacatccgggttatccgccaggtatttctcaacgtcctggagaatcccgcttttcaggggcaagttctttttttcgtctgtccatagttcaggaaaaacagcacgaactttattgaaacacttttcaaaatattctttcggatattttgggggaaaagtgatttgttttttcaaataccagggctgaggctgctttttatgtgttttctctgctacagcatctttcttctgtactttcttgttttcattaactgctgatttttgtacttcctgcggcttttcattcaccacaggattttctggcatgaccagaacgcggcgttttttgaccacaatcacgggtgttttttttggctgcatactcgcctcaataattgctgtcatattgactaattataccattttcagcagttaatatcctgaaaatacatggaaaagggggtatccgtacagaataccccctttgcaaaggcgcttaatgccagaaccacatcatccccaaaaaggcgggctttcgcccgcctccgggttgctacttaccgttggattcgtaagccagacttgccgtaacctccctgtttccatctttcagccggacctcgcacaaacgattccgggtcagatacgtgaatattaacaatgtgcagcacacgattaataaacaccaggtcagggcgtttttcggctgtttcatggccttcttctccttgcgtaacgcgcggtaagaggctatcctgatgttgttgaagcattgggatcgcctcgtgggtgtactgaccccaaaaagttggacagttaaacacgaggcatataggtctgattccgatattcaattggagtcagaccttttaatttcaggctaattcttctgctgttgtagtattcaatatattccgtaacagcatccttcagttcgcttatattactgaactcatcaagataaaaacactccgactttaaggttccaaagaaacactccaccacagcattatccagacaattgccttttctggacatgctttgtttaataccatgttctttaaggatattttgatatcttctcatacgatactgccatccctggtcagagtgcagaacaggatgctcgtgaggattaagctttttgaatgcctgatcgagcatattctcaaccatgttcatcactggtctttccgaaaggctgtaagaaataacttcgttgttgaagagatctattactggagacaaatacagcttgcgcccattgactgcaaattcagtaacatcggtaacccacttctcgtttggccgcgtagccttgaaatctctttggagaacattaggggcggtttgccctacctctcctctgtaagagcggtatcgcttgaccttaatcgctgctttaagtgagagggttcccatcaggcgctgaacagctttatggttaatctgtttcccttctcgatgaagagacagcgttaccctacggtatccgtatcggcctctattctcgtgataaatctcactaatacgctttttaacgtccgcatacttgtcaggcttgctgagagcctttagatgataataaaacgtactgcgcggtatctccgcagccctgagaagctcatcaagaggataaaactgccttagctcgttgagtactttcactttttcgtgggatgagctaaggctttcagcttttttagatacataagccgcgtttcaagaaatcgaacttgcctttcaagatcctcaatgcgtcggtcttttgacagctccaatgctgatgccgctttttctggatcaactgatattgcaatgtttcttttggtgccaatcttgagcgcgcgtaaaccagcttctccgcgctcttcatagaccttcagccacctggctacagaaccactaccagcaagcataaagtgagcagcagcctgattaagggacatgtgctgctcgatcacagctttcacgaccttaatacgcaactctggatcagcactaacgcctttaggtttgggaattaaacctttttctccatgtttttcatagagggcaacccatgtcctgacctgggttcgggggacaccaaaacgtgccgagatgatcctgtaaccatcatcagttgtgaagtagtgattcacgacttcaaggcgcttttcaaaagggtattttggctttgacatattaggggctattccatttcatcgtccaacaaaatgggtgcagtacatgggttaatgaaaaattaactacggggctttcttctttctgccgcacaacaagcatcagcagcagttccaggcttccggcaaggcgatcaacgacaaggtgcggatgtatgggcgcatcggtcaagcgttgattgaggccaagcaaagcggcagcgatccgttcgccgccatcgaggccgttatgccctgggacaccttcgccgccagcgtcaccgaagcgcaaacattggcgcggcctgccgactttgatttcctgcaccacatcggtgaaagctatgccacgctacgccgctacgcgccgcagttcctgggcgtgctcaaattgcgggctgcgcccgccgccaagggtgtgctcgatgccatcgacatgctgcgcggcatgaacagcgacagcgcgcgcaaggtgcccgccgatgcgccaaccgcattcattaaagactaactatcagaaaaactcatcgagcatcaaatgaaactgcaatttattcatatcaggattatcaataccatatttttgaaaaagccgtttctgtaatgaaggagaaaattcaccgaggcagttccatagaatggcaagatcctggtatcggtctgcgattccgactcgtccaacatcaatacaacctattaatttcccctcgtcaaaaataagattatcaagtgagaaatcaccatgagtgacgactgaatccggtgagaatggcaaaagcttatgcatttctttccagacttgttcaacaggccagccattacgctcatcatcaaaatcactcgcatcaaccaaaccgttattcattcgtgattgcgcctgagcgagacgaaatacgcgatcgctgttaaaaggacaattacaaacaggaatcgaatgcaaccggcgcaggaacgctgccagcgcatcaacaatattttcacctgaatcaggatattcttctaatacctggaatgctgttttcccggggatcgcagtggtgagtaaccatgcatcatcaggagtacggataaaatgcttgatggtcggaagaggcataaattccgtcagccagtttagtctgaccatctcatctgtaacatcattggcaacgctacctttgccatgtttcagaaacaactctggcgcatcgggcttcccatacaatcgatagattgtcgcacctgattgcccgacattatcgcgagcccatttatacccatataaatcagcatccaggttggaatttaatcgctgcctcgagcaagacgtttcccgttgaatatggctcataacaccccttgtattactgtttatgtaagcagacagttttattgttcatgatgatatatttttatcttgtgcaatgtaacatcagagattttgagacacaacgtggttcccgccatatgaaaatccggccagaccaacatcattctggcgctccgaaagaagggatattcgccgccgtgaccagcctggagcgggtcgcataatctttggccgcttcgtagtcgaggaacatggcatgaaccacggcagcctggcggctgcaaattgaaaaccgccccggttcgtcctgttgttgccgcacgccccgcagaatatgtatgctctgaggacctgttttattaaggactcatccccttatgttgacccgcaaaagtatcgatacagttctgctctctgttggtgctgagaagctctcacaacgagaatgggactggatgaaaatgctcaaacccatggacccaccacctgcgatggtgacgacctccatcctgaagcgccgtggcgatacagcagcccttaccctgctacaggataccggggtttaatccatcctcatgttgtccggttttactccccgccctctgaaacgtctgttcacagccaaccagtgctggacgtccttcctggatgcgggcggtctgcgcgatatcgaggttgaagccgtcaccaaaatgctggcctgcggcacacggatactgggtgtaaaagagttcgggtgtgataacccggactgtcagcacgtaaagtacctgaccaactcatgcggcagccgtgcctgcccgtcctgcggaaagaaggccacagacctgtggacagcaacacagctgaatcgtcttcctgactgcgactgggtacatctggtcttcaccctgccggacacgctgtggccggtgttcgaaagcaaccgctggctgctgaatgacgtgtgccgtctggcggtggagaatctgctgtatgccgcccgaaaacgggggctggaacccggtatcttctgcgccatccacacgtatggccgtcgtctcaactggcatccgcatgtacatgtgtctgtaacctgtggaggtctgaataagcatggtcagtggaaaaagctgagcttcctgaaagacgcgatgcgttcacggtggatgtggaatatgcggcagctgcttctgaaagcgtggtcagaggggatggcaatgccggagtcgttgtcacatatcacgacggaatcacagtggagaagcctggtgctgaaatccggcggaaaatactggcatgtgtacatgtcgaagaagacagccggagggcggaatacggcacgctacctgggtcgttatctgaagaagccaccaatagcggcttcccgactggctcattacaacggaggggcaagcctgagcttccgttacctggaccacaaaacgggagaaacggcgacggaaacgctgacacagcgtgagctggtcgcgaggctgaaacagcacatcccggagaagttttttaagatggtgaggtacttcgggttccttgccaaccgtgtgtgtggagagaagctgccgcaggtgtaccgtgcactggggatggataaaccggaaccagtggcgaaagtgtgctatgcacaaatggtgaaacagttcctgagtcgtgacccgttcgaatgcgtgctgtgtggctgccggatggtataccgccgggccattgcggggctgaatgtatcagggctgaagaaaaacgcgcgggatatcagtctactgaggtatatgccggcctgacacaggctaagtgtgcccgggaatcggtgaaagtataaaaaacagcctgttacggtataaaaatcgaccatacagagagggaaaccaccggagtggtgggaaaagcagaaaggctcacgtggcataaggcgtggacaatggtatcgactggtttttcaatttcctatacgtcaagatacaaaccaccttttcgccatgaggcagaaagcctcaagcgccaacagcattatatattgaccaggaattaaattcccagctttcggcgtggactatacagtgtgtgattcaccacgatgaatcctttgttgatccactgtgtgacctgcgcaggttgaactccggtcagcctggcgaacgatgcctgattcccccgatagaacttgttgatgtattcaatcaaaggcattttttaattctccgaaacaacgcaaaatcatatagtaatttactatatgatttttattccgcaagtgattaactcatcggatttctttgtagttaacgaaacgttaaatttagtttgtgcctggaatggcacgcaagaagcacactagcattatcattttgatcaaaacgctatttccccccgttattggggggctttctttttgatgccgcgccagcggcatgtaaggcggcactctgttgttttatatggcacagagctaaaccgccgaagcccggcgtaagccggtactgattgataggtttcaccttacccatccccatcctgctaagccatacccgctttcagccatgaaatagcttttgtgcgcggtcggagtggtcccgacaagggtttacccgcagtcggggcgtatctccgcgttagcggaccgtcagggccgcttacgagcgtgtatttggtacttccagccagaaggctgacagcgatgagatttcttagttacaacatccattattgaaagcgatgttgttcccgccctttgggcgggggcggcggcgcttttcagtgatgggttgggcactgtggctgagtatttgcagcgtttttttgtaggagggttggaggggctttgtttttcattaggcagaagtccatatgcccgccgcgaagcggtgggaggtacttttatattctgagcggcgcggcgttagccgctgcaagcgaaggcatttttgtgattatccacagttgtttcaaagataaatattttccctgcggcgaagcaacgcaggggattaaagaacaggggttaagaatatattgcgggtttgatgttctatgtttgctgctttctgaagttattcctttgcgggtttttgtggataaccgaaggcgtttttactccgataccctattgcggccatcaaaaaactgtcagagcgggacaaaatgaaaaacggtcgtcaaatatgaggaatttcatgaaatgcaggcaacacgaaaagccccgaaggggctgaagagagtgccgattgtatcaggcagctaaagtgtaggctggagctgcttcgaagttcctatactttctagagaataggaacttcggaataggaacttcatttaaatggcgcgccttacgccccgccctgccactcatcgcagtactgttgtattcattaagcatctgccgacatggaagccatcacaaacggcatgatgaacctgaatcgccagcggcatcagcaccttgtcgccttgcgtataatatttgcccatggtgaaaacgggggcgaagaagttgtccatattggccacgtttaaatcaaaactggtgaaactcacccagggattggctgagacgaaaaacatattctcaataaaccctttagggaaataggccaggttttcaccgtaacacgccacatcttgcgaatatatgtgtagaaactgccggaaatcgtcgtggtattcactccagagcgatgaaaacgtttcagtttgctcatggaaaacggtgtaacaagggtgaacactatcccatatcaccagctcaccgtctttcattgccatacgtaattccggatgagcattcatcaggcgggcaagaatgtgaataaaggccggataaaacttgtgcttatttttctttacggtctttaaaaaggccgtaatatccagctgaacggtctggttataggtacattgagcaactgactgaaatgcctcaaaatgttctttacgatgccattgggatatatcaacggtggtatatccagtgatttttttctccattttagcttccttagctcctgaaaatctcgacaactcaaaaaatacgcccggtagtgatcttatttcattatggtgaaagttggaacctcttacgtgccgatcaacgtctcattttcgccaaaagttggcccagggcttcccggtatcaacagggacaccaggatttatttattctgcgaagtgatcttccgtcacaggtaggcgcgccgaagttcctatactttctagagaataggaacttcggaataggaactaaggaggatattcatatggaccatggctaattcccatgtcagccgttaagtgttcctgtgtcactgaaaattgctttgagaggctctaagggcttctcagtgcgttacatccctggcttgttgtccacaaccgttaaaccttaaaagctttaaaagccttatatattcttttttttcttataaaacttaaaaccttagaggctatttaagttgctgatttatattaattttattgttcaaacatgagagcttagtacgtgaaacatgagagcttagtacgttagccatgagagcttagtacgttagccatgagggtttagttcgttaaacatgagagcttagtacgttaaacatgagagcttagtacgtgaaacatgagagcttagtacgtactatcaacaggttgaactgcggatcttgcggccgcaaaaattaaaaatgaagttttaaatcaatctaaagtatatatgagtaaacttggtctgacagtctgagtgtgttctgaccagtgaccgggtcttttttaacgagacgattgtaagcgtggcccaactgtccgcccagcgccttatagttgtcgggacggaaccaggctggattctcacactttggcttagtggaatgttcaccccggcgacgttttgttgttccgcctttgttttcctgggggaccaggaatgagctttcaattcccgcttcgtagtcctgccagaaacggatctgctcttccggtgatagttcagaccagtgacgtttgctaatcacagcaagctgcacttagcttgcactgtaagagttgatatttccttctcatggaattaaactccacttcaggtaacaagcatacctgaaataaataagctcaaggctctgccttgatgtcagcccccgctaatcttcgctgcctggaaaacacgagattacgggggttttctttatctgaaatttacgttcttgaacaaaatttcagcacctcgttttctgcatttacaaatcgcggaaaacttgcctgcaaatttagcagcatgggcgcaatcgatcaacgatgttcaagcctggctcgtttcctttttgattcagcacacatctctgacagcttcaaaatcgttttcagaacagctactgaagccccttctttactgacgttccccatacaaaaccttacaaaatcagaaattcagaattttgtatattcaaaaaagtttttttgactgcatacacccactcacacgatcgaataaaccacacaaacagtattatctagatttttagatcgtacatcatttaacaaacagaatattattctgctttttagatgttatctagatcattagatcgctcacgcggcattgacaggttttaaatgtcgcacacacaatactatccagatgattgtaaaaagctcgttcatcgcgttttttgtgctcattgcctggaaaatgagcactctttgacgcccgttagaacgcttgtcatctcatgctctttaacaaccccggacagcggtcattgcctaaagccctggcataaggaggttattattcgtgcatttcaagcaccgctggcatctgtcagcaacgggctacgtaacagagtgacgtgccgcgccatctacacaggtaacgactctttatccgcaaatatcattctgcatacttaaacccccttatttggtgaactcgcgttgagttaatctcactcactctctccctgagcaagtcgtacaggctgcaacgcagaagtacaccagatttgccagtctccactccaggtaagggggtttagctatgcatgatgatgaacaatcagataaagagcctgtagtgagtggctgcaacttttcataattagcttatgacgctgtattccggggatgtttctatttcagacaaacaaccgggagaaaatatggcgcgtaagttaaaaattaatcctgtcattcctgaatgtgtggcagatttgaaaggatatccactctatatcatcgttgcttattggggattaagaaataataaaacgctcacaacaacggatgttagccgtaatttccttattacacagcaacaatcttatgatgtgcttacctacatttaccaggaagcacagaagcagataacagcaactaaacgaacactatttaacgagcacaaaagaagaattagtgcgttcaggattcttgatattgacaaaggcatattgcgcaccccaaaaaaagagattgcatatgccagctacgacaatataccaactgtaacaatgaaaagtacccgttgtgagatccaagatagttttacagaactgcgccgctggatgtgttcaagaaagacaggtgatcgagtggaggtatttttgaatgtctaagtaccaaataaacgcaaccatcaaaaaaccaggtggtggccccgtgaaatggactcattacagcgacttccctatgaccgctgaagaatgcagaaaaaacttctcaaaagaaaaagaagcaggaaagtgtttttctgttgatgttcatatttcagatttcatttgcaaagaaatacatccactgtgatgaatggggagaggattaatcatgattgacgctataattacgccaatagttacatctattccgttactcttattaattttagttgcgctgatattcgttaaatctgccgtcaaaatcgtgccacaaggtaatgcctggacagtggaacgctttggtaaatatacccatacgctttcccccggtcttcacttcctgatcccggttatggaccgcataggtcaacggatcaacatgatggaaaccgtcctggatattcctaaacaggaagttatttcgaaagacaatgcaaacgtaactatcgatgctgtttgttttgtccaggtcattgatgcagcgaaggcagcttatgaagtcgataatcttgcatcagctatttcaaatcttgttatgaccaatatccgaactgtcgttggtggaatgaatctcgacgatatgctttctcaacgtgacagcatcaattctaaactgttaacggttgtcgattatgcgactgacccgtggggaattaaggtcacacgtattgaaattcgggatgttaaaccaccaaaagaactgactgaagcgatgaacgcgcaaatgaaagcggaacgaactaagcgtgcccggattcttgaagcggaaggtatccgccagtcagaaattctgaaggcagaaggggaaaaacagtctcaaatactgaaagcggaaggggaacggcaatcagcatttcttcagtccgaagcacgcgaacgtcaggcagaagcggaagctcgcgcaacaaaactggtgtcggatgcaatcgctgaaggtgatgttcagtctgttaattactttattgcgcagaaatacactgaagcactccaggcaattggcacagcatcaaacagtaaactggtgatgatgccgcttgattcaagtagcctggtgagttcggttgcaggtatcagtgaactgctaaaaaacgtatcacaggatactcccaaagttgatatgaaacaggctcaacaatatttgtcttaaaacagatagcggacggtgacaatattgttttaatcaccgtccttatattcatattcacgaatgagcaaatcattaaaatgaaaacttatgggttcatccttcttattttacatataatccctatgggggcatggttctttcttctttttattacaaacgatgagaacaaagtagaaaaaatacaaaaccacatcgtatcaatatttccattatggctgaactggggaggggtgatgatagcgatggctctactgcccctgttaatatggagttttaatggcatattcttcggcttctttctgctaatttatgcatttggcgtttataactaccttcatcttctttattcaatttctcccttttatcatggagattagccatgttatggtatacactatttcttctgtgtattgcacttgaacttataaccggaacaggatggttactcttaatcagtcttggtgcattatcaagcgccattgtgggcttttttcttccgatatcacaagaagccaatatatgcttctttgcgtcaatcagcatactggcgtcgataattaagttcttctatgacaaaaaacataagaaattagacactctcctggtgaacccagggcattcacgttttaaaggaaaagaatttacgctcagtgacgatattgttaacggcaaggggcaattactcattggtgatacattctggcctgttgagacgttacacaatgaaaactaccttgcgggaacaagagttattgttacagacatgcaaggaataactcttaaagtaatgaccatcgaagacaagagtgaaaacaaggaataaatcatgcatctttcgttgttaattccgcttacaggagcagcgatgaatgcactatgtatttttattatcagacttctggataaggattttattgaagtctacaaaaaaacgctaaaaaaaattactgcattacatattttattgatggtgttaagtgtcacaggaatagtatgaggacaattctatgcgaaacgcaaatgaaggaatttctcttgcagctattgtagctaaagaaacaacaacaggtaaatggaatggtactggtgggggtattggtttaggtactggtggtattggcttattcatcggaggtgtttctggttctaaacaagagcagacacaaagggcaaaaaactttgaatcgcctaaagaggaagaatacagtctattaaatgtatacggttcgataataaaagttctcgttttcggcgtgctatttggtttatctgcccgtttatttacatctttatcaaacactggttctgattttgctgaaccagtaacaaccaccacagccacaggaaagattcaatctattatgggtggcatggcagaaatggtaagcattttaggcaccgttgtcccttttttagtaattatcacagcaatgatctggtttctgtttttcagcagcaaacgagaaaaagaagagttaactcgagttgaacgtgaagctgctaaaacaaaactccgtatagatgtctatcaccgtttacgttacgttgaaagcgatcatgtcgtttttgacccgattacaggccgggaggttccggcagaacggacgtgtattaataaactgattgaggcacttgttgatgaaagcaacgacatctcaaaaagaaattgacgaacttctgaatgcaataaaaacaggacattcaaaattcattctatcaatacccgtacatactacccatccaatggcccataaaataatgaagccttacttcaggagaacaggaccgcttctgtattcagatagtatattcaggatttgaagaaagcatttatttatatagggcatacaaaaatgagtgcttttattaagctggcatctgttctggcgttatttattagcccggttgtggttgcaatagcaggagaacaatctcactgtacaaaaatcaacgaataccctttcatcgtcactcaatgcgacgacggaactgtgacagtggtaaatgtgataaataaccgtgtagctgtgtgccgtaaaggggaatcatgcaaagaaataaa

SEQ ID NO: 164 - DNA, 70311 bp, Artificial Sequence
  plasmid TP114Kill1
attataactctggacacattacatgactcaagcaaaagctaatctgagaaaacttcgccgtgcacgttatgtcccccctcgaacagtaaagaaaagcatagcgaatacagaacgtgtcgtttcaaaagcaattaccggctgtggtgtcttccgtgatataccacaagtaaaaatcaatctcatcgaaacaaggaaaattttacaaatcgaactggctttatccattgctaacttatctgaggcgaatccaattgagatacgaaaaaaaatcaaaagcattgaccgacaattatcttcaacctcaaaaatcagaactacattatgaaaaaaaacgacgatttaatcactttaccacctcataacagccacgctctcgattacatcattaaaaaagcgtttacaccacgtaaaaccaaaacatcgacagcgacccacaacgtttatagttacaataaagaagaatccacattaaatttccaaaaaattggagaagcaatttttttcggcacagacctggtaattaagctgaagccaaatattagtgcctctggtgaactcttcatctgccagaaggactaagctatgaacattgtttcagaatttcttgagaaagtaacaaccattgttgaatccacagcggcgacgaacgccgctaaggtcgcacaggcaatatctcctacattttttgcggctatagccttatacgttatttatctaatatatgaaatcacgtatgcccaacgtgacatccttatgaacgaggtgacgaagaatatcggtgcattcgccctggttggtgcattcacttattcagcgccttattacagccagtttgttattccttttgtaatgcacgctggctccgacctttctgctgctgttactggaggttcaggaactgcaaccagtgttgataatttgtggaacgctctatctacgaatttaaacaacttccttgatacaagtatgagtatttatggaaagttccaaattgctgagaaaatgggggtttatctagtatgggggattggctatatcggcggaatgcttctcatctattacactactgttttcttgacactatcaactttcatggttggaattcttctttccgctggcattttattcatttgtttcgctctattttcatcgaccagaaatatgtttactgcatgggtcggcagttgtctcaactatatactgttaaatttattctatagcatatcatttagtttcttaattagtttcgttgaatcagttgtccctgttaatggagatataaaactatctattgtagtttactttttccttattactattatttccatattccttatagaacaagttggcacactctgttctacattaacaggtggggtaggtataaatggccttacatcagccgctaatggctttggaggtaaggttgcatctggttttatgcgagcatcaggactccgatctttcaccaatggatttgccagcaaaatgccaaatccattctttaatgcaggaagtcgttctgcatcagcattagttcagggattaaaccgtggaagtaaacttaaagcggggtgattaacatgaaagataaagtattatcatttctctttgctggaataattaccgtaacatcaccatcaatctttgcatctggtattccagtagtagacgttacagcgatagctaaaacagttgaagaagggctaaatcgtgccgctgaagcggcaagacagcttgagcaactcaagcaacaatatgaacagaccataagatacgctgaagaacagaagaaaagactcgaaggcttcactgatttcagcaatggctttgatagcgcatccagctatatgaaggattctctatcaacaataacaaatagtgcaaaatcagatcttagctctttgcgatcgcaatatgacttatcaagcaacattgcagagacgcaacaaaaatatgatgcaatcctggctaagatcaaattctatgaaaatttcaacaatgaaatgcaggaaagggctaagagattaaccacgttacagaaggagttcgcgtcagcagatactccgcaaaaaaaagctgacttatctaaccaattgaatacagaaaaattgacaatggagctacaattgaagcaatatgatattgcagagagacagctaatcgcgtctgaaaatgcaagacaagaggctgttagtcgagaaaagtttaaattaatgatgcaataggtgttcgaatgaaaaaattcataagcactttaactatcttgtcatgcttccttttagctgcttgtgaagacaaagtttatgatgtcagttactacactgaacatcttgaacaagcccaagatgttgtcgaaaaatgcagcaaaggggatatgtctggtcaaaactgcgaaaatgcgcgtgaagccattcaaaaagagcaatcgggtaaagcatttaaaaatatgatgcaataatccttcattaaaaacagctcgcaaagcgggctttttttggctgtacgcagtgaccagttgataaatagttctaatgttcgtgctgcattagaacaacgcacaaaaagaagagtacaagaagacagtgcgggatctaatggaacgtttacaatagaatcaccttccctatagcaaggtgattctatttaaaagaatacccgcctcgtgcgggtcttatcttgcttaaagatctatgaaacctccggcttcgggtattaaactataacttgctttggcaaatattgtttcattgacttcatggaatcttattttctccgcctgttcatatgttacagggaagaacacgccccctggctcattaaacatcataaaatcaccttgcattgcgttacaatgacaacaatgattcgcgtaatacttcatttttgctgttttgctatgggatggataatataattttgaatactcattaatccttgagagagcagaggttgaaattatttcaattttcgttaaatcagtccaccatactctactggttaaccaccgataaatcatatttttctttgaatcaaaatactccatacccttaggggaggatgtttcataccattcatctaatatacaatcttcccattcggcaggatcaactccccaaataacgtctctatacttataccaacgaggcaaaaaaacaccaaacacaggagttattttcttacagcgccaacatgactggtaactttccgcaatataaaaacgttgagaaaaaatattgtaatcatgttcgtttaattcttttacccactgaataaaataaattggatttttcccctgtggaacaaaccatttccgttgttcttgatcccattgcgcccctttttgtttggctaactccttttcttcaaaaggtacatttaaataaaaccgcgccataaccaacttaactccagtattctgttctgatgatgcaacaggatagatatcaaaactaaacaaagagtgcaattccgcctttaatggctcattcgtacccgcctcgtgcgggttttcttttgcctgaaatatggaggaactccatgaaatccatcattttatcgatggttgccgccaccgcattactgtcaggctgcgcggatagcaaaacacaaccagtacctgagtcaccgttaaccaaacatgaccatcagatcacgttgaaaattgataccgtgcgaacagacctgccggacagttctcctgtttgtttgaatggtatgaatatatacgaaagtctgagcgagcggcatccaggcttgtttgccaaaaatcagaacgtgattttccgtagtgcattctttgatgacggtcaggcgatatcctccgaaacaatccgcaaaataatgcagagtaccccgtgcgttgaatcacaaacaacatctgccggaagctgggaacctgccacggaactgctcccccgtcaggcaatatccggtgacactacactggctgaaaaagatcggactgctggcttcacaatgcggatagcaccggagattgagcgtggaaatttccacctgctactcacaaccactgacccgatacggaaacagactgtcgagcagaatattttactcaaaccggaccagccccttatcgtgagtggttttactggagttaatgctgatagccaaagtgagaaccggattgtcatcattacgccacacgtgcgttgattcccctgatatttaaattacccgcctcgtgcgggttttcttttgtctgaaatatggaggaacaccatgaaatccatcattttatcgatggttgccgcaagtgctatcgcactctctgcccccgtatatgcgtctgatccgtgtgcttccgttctttgtctgtacggtaaagctatcggtagcggcggcgggagcgaatgcaaaagcgccgaaaaggacttctttaatatcataaaaaagaaaaagggatctattcgctggagcaaaacctttgatgcccgaaaagcgtttcttaatcaatgcacgaccgcagaccctgcggcgatctcaaaaatcatgagtaagttcggacgttcctggggttaaccatgaaaaagctcattattattcccaccacattattgctgaatgcgtgttcccatgcccctgaacccgcacaggcaaaaggaggttggtatgaactgaataccacaattgagcaggtaagagcagacacatactataacggggtgatccttcagcagcccgtgtcacagccaaacagcactgttcaatacagcaatgataattatctcaaaaaggaaaccataaacgtaactcccgcgcctcgtattgcagaaaccgtaaaaccacgttctgagcaatcagcgacagcgccaaaaaaccagggcagcaataatagttttctgaagccgacaacaaacagcataacttcatctggtgagataaaaacagcagccaaaggagcaactaaacagcattctgaacaaccagcactctctcccgcaaagccaatcagtagcaacaaccatcaggcacaaacggcacaaaagactgatcagcagacaaaaccgcgtcctgaacaaccaccgctaatgtcaaaaagcggttttctgaaaaaaaacgctaacaacgctgttccggccaccacgcttacaggcccatcaacacctgaaaagcaaatttactttgttcgccatgatggtaaaggctcgctgcaaaaagcattaaaagaaattgtcccatcggactggacggctgaaatatccccggaggtaacgaaaactttccgtcgcacgatatcctggcagggcaacgatcaatggccttatgtcctggataaaatgcttcgcaactacggtctgacggtaattaagaacaccgaaaaaagacatcttctgattgattttcaacaacagaaagggaaaacatcacaaaaagcacctgtatctcctgacaaaacccctgcatctcctgtcaggacaccagtttcctctgacaagttacctcaaaaaccgctaacgcctgtcaccgttccgcaaaaacagacagaaaaactcacctggaatcttaaaaaaggttcgacgctgcgggatggcctcaccgaatgggcgtcaagttcaccgtgtggtaattcaacctggaatcttgtatgggatactcctgtgaactacagaatagatgctcctcttattttccggggaaactttgaatctgcattaaaagatacgctgatgctttatctttcagcagataaaccgttatacgcattcaggaatattgcacaatgcgtaatcacaattaaagacacacaacaggagtaatcgctatgggttggttcttcagcttgctcctgatattcctgtcaataggcagttactatctgacagataacaataaccaaaccatacagcgaatgaagttgcttcctgcaaaacaggaagcaattgaatttgtccatttcgcaaatgttatcaatgactatctttataaatatccagacaaacgtaattcaggaggaacgttaacatctgagcaaatcggtataacacccgtttatgatattcatcatattatttacggtaagcgagtttatatctggtctgccgatacagaaggtctgatgtctgctttgcagcagcaaacaaaacattcagcaatgttaggaagagtaaaaaataagaagattgtcgataatcaggggaatgatatgggcgttcccgttccttcctccattccagaagaggctattgtactcattaactaaatatcccctgacaaggggattctgaactggagtctgcatatccgacacatcattatgtgggccggatatatcgctacggcgcggacttcagtccagaaaatctttaccggagatacccatgcaggataatgatgatgtcagcgagcttgatattgccactcgtgaagtccttatcttacgatgcaatcttattcagcttgcttctgaatatataaaaataaatcctcttaaaaacacccgaatctacacagatttaattcatcgttcagcagatgttatcaaaaatatcgaacaaggtaacatccagaataaacataattatctgtcacaggatgtaaaacatacgcttgttttatacgacctgtacaaatcagactttgaacaatgtccgggggcaaaatcccttatacctgtcagggaaaaaattgtctcgctgaaagaacttctttccggcgctaatgagctggacagtatcgttcgtcgcccccgcaggaaaaaacgttcttcacgaatttaatatcaggagataaatcccttatgcagttatcagcggctgttctggcagcactgataagtcagtgtgcccctgatgtatcacccgatacgatgaatgccctgattatgactgaatcaggggctaatccatatgtaatagcgaatgtttctgacggaacaagtaagtattttaaagatgaaaaaggagctattgaatatgcagaaaaattaacagcagaaaataaaaggtttagtgcaggtctgacacagatatacagcaaaaatttcccatcactcaatctgactaataaaacagtttttgacccgtgtacaaatataaaagcaggagcggcagtcctgacggacaattatctgagacaaaaggagggtagtagtaatcaaaaaattctccgcgctttatctttgtattattcgggtaacgaatcaacaggatttattaaagaaaagaaatttaacaacacttcttatctggaacgggttattcgtaacgcgaataactatatcgtgccatcaatccgtgaaaaaactgatgaatcagaaataaaacccccgaatgatgaagagaaaacatcaccggactgggatgtttttggagattttagttaatgaaagtcaaatcaactttgcagtattttatcctggcgtttttcctgtcactaactgcctccgttgcctatgcaggtggactcgataccgcaacaaataccatgacagaacttaagacatgggcatttagctttggtggtgtttgtgctttgtgttacctgatctataacgtcatcatggcattcatggagaagaaaagctggtctgatgtaggaatggcgcttgtctattgttccctcgctggcggtgcactttacgccgggaactgggcgctggaactcttcaaataagtaatccatatatacaactgtgccgcatatttaccttatgtgtgaattgcggcttttttcatggtgagttatggacaaagtaaatgaacatgtcagtgagtcattcatgacttataacgggtttaaccgtcctgcgttaattgctggtatacccttaatgttgttattgttcacggcttttttcgctgttctgacaggcttccccgctattttcctttggggtataaaagggataattattcctgtcatatgtgcgctgtttctttttatagtaaaactggcctgtgaaaatgactcaaacgcactaagagtcatccgtttaaaccttatggggcttttgttaaaaatccgccacagagatttaattattggttattcatctgtcaggtaacatatatgcacaaaatcaaattaaaaaacagtgacaatatggatgttgctcgtgaatatcccgattatcgcttccatataacagacagtattatctttacttctgacaggaaaatgctggcttcacttgttgtagcaggcattccatttgagacagagaacgataatgttcttacaaatttatttaacagcgttaaaaacttcctgattgggttaggaaaggaaggcgacctgtatttatggactcatcttatcaagaaaagagcaaccatcaatggagaatggaattttgacaatgattttttaagcaggttttcaaaaaaataccttgctctgttcacatccagcgcattctataaatcaacatggtatctgacatttgggattccctacgatgatgttgataccggaatcgagcgcatgaatgaaatgacacaacaggcgcaaaaagcacttctaccatttaacgcttctttattatccgtttacaatacttatattagtgaggtggcagactatctatcactattgctaaatgcagaacataacatgattcctttatcatccacccccttatcatccagtatttgtgattctgaatggtattttggtgctgatgttcttgaactgcgtaacaacgaatcggatagtaaaaaattcgcaacgaattatattttgaaggatttcccgatagaaacaacccccggacaatgggatttccttctcaaacaaccctatgaatttattcttactcaatcctttatttttgagtcaccaacaaaaaccctgaagaatatcgattcacagttaaacaaactacaatcagctaatgatgcagccaaaatacagcaggaagaactcgaagctggtaaagaagcggtcgcagccggaattacgttgtttggttcactacactgcgcattaacggtattcggtgatacaccagatcaggccagaagcaatggtataaagctctctgctgagtttattacttcgggtaagggattccgcttcagtcgcgcctcactcgcatcaccttttgtttttttcagtcatatgccgctgaataagaggcgtccactggatacccgaagaacaattaccaacctggcctgtctgatgtcttttcacaattattcctccgggaaaaaatcaggcaatcctattggtgatggctccgccataatgcctttaaaaacggattcaggcagcgtttactggttcaatacacattacagcccaccggaaaaaaatgttaccggacaaaaaattgccggacacgcaatgtttcttggcgcaacaggcacagggaaaacaacatttgaagcaacagccagcggctttcttcaacgctttgaccctttaatgtttgttgtggattacaaccgttctaccgaactttttgtccgcgcatacggagggagctatttcacattgcaggaaggtatctataccggctgcaatccgtggcaactggcagaaggcccggaatcgcccgtctggcacagacttctcgcatttctgaaacgctggacacaggttctggcacgagacaaccagggcaacccctgttctgatgaacatggcattgaattaaacgctgccgtggaaagcattatgcgaatgcctgtcgaagaacgccggacagcccttcttctcgatatagtcagtcctgaacttcagacgcgtctcgccaaatggtgcgacaacggcgaatatgcctgggcggtggattccccccggaataccttcaatccactgcatcataaaaaagtgggatttgatacaaccgttgtcctggacacaaaaaacggtattcatcctgcctgtgaacctttactcgcggtcctgtttttctacaaagaaatcatgcaacgcggcggcaatctgatgctctccattattgaagagttctggatgccagcaaactttcccatgacacaaagcatgattaaaagcgcactgaaagcggggcgcatgaaaggtgaaatgatgtggttaacatcacagtccccggaagacgccataaactgcgcaatttttgcggcgctggtacaacaaaccgcaacgaaaattctcctgcccaatcccgatgcaaaatgggaaggatataaagaaattgggcttactgaaaaagagtttgaaaaactcaaagagctgacgaaggagtcaaggaccatgctcatcaagcaatctggctcttctgttttcgccaaaatggatttgtttggattcgatgagtttatccccgtgctttctggctctgaaactggcctgtctatttttgatgagattattgctgaaaaaggagatgtagctcctgatatctggataccagaactcctgaaacgcctgaacggttaatttctctgttttatacagaacggaaaacaatatgaaaatccccctcataattgcctccgcgctattaattagtgcatgttctcacacccccaatcctgtgcagaaaaaagggggatggtttgagttaaacacagcaattgaacagatcaaagcaggtgattattaatggaaaacacaaactattatgaacattcaaaaaaagaagccaccaaaaagaaatttgaagaaaaaaacgaaaaaaaggattatttcaaggccatacgtgactttgagcgcagtgaaattgaaatcataaagaaaaaggcaaaaacatttaccattctcgccattggtgaatttgttgtaatttgcattcttggtttcgcaatagcctcccttgctccattaaaaaccgctgtaccgttccttgtgcgagtggataacagcactggatatactgatattgcccctcaattatctgatgctaaggaaagttatcaggatgttgagactaaatatttcctgtcaaaatatctcattaactatgaagcatacgactggcagaccatccaggaacaggccgatacagtaaaaacaatgtcttcccaaaaggtgttttcagcttatgacaccatgattcgtgctgattcctcaccactgaacattctgaaaaacaactacaaaattaaggtccagattaattcagtaatccttctaaggaaggatatggcgcaggtgcgtttcaaaaaaatggtactggatttatctggtaaacccgcccccggatacagagcaacagagtggatttcgacgatttcttttgactgggataaagatatcaaaacagaaaaagagcgccttgtgaatccgctgggactgcaagttctgagctaccaacctgatccagaggttataaaatgatgcttaaacgcactactgcgatagttcttttgtcgatgctacaagtacctggtgctttagcagctatgtacggcacaccatcggaacgagacgggcgtattcagaccgtagattataacgagcaggatgtatttaatgtgcgcgtaaaagcaggcgcacaaacaacaattaagttcggacaagacgaaacaataaaagatgtcggaattggtgatccagaagcctggtcagtatcggtcagggacaacactctgtttctgcgtccaaaagcagaagaaccggatacaaacgttaccgttcagaccaataagcatatatatcctctttacctgatatcaaccacgaaacaacccacgtatattctgcgttttaattatccgaaaccaccgtcagctaccgtaatgactgaaaagccatttccatgcactgatggtggaataattaatggtcattatcaactcaagggggacaaatcaattttcccttatcaggtatgggataatggcgaatttacatgcatgagatggactaataaacaggaaattccggtcctttatcgtgttgatgccgatggaaatgaacatctggttaacggagacagaaataaaaacacaatggtttactatgacgtggctgaaaatctccgtttgcgcctgggtgatcaggttgcagatatcagaacatcatcaatcgttaatcgtccgtggaataaaaaaggtacgtcaaacggaaaaacacgagtagagaagttcagctatgaaaaataaagatgatgaaaaaaataatgacgcgggaaatcgcggaattatcgaagtaaaaggtaaagcagcaccaaaaaaaatattaatcctcatcatattactgattgccgcgttatttgtgatcattatcttgtttaaagttctgtcacgagaacaggtcgttcagcaaacacctcttgagaagtctgacgagacactggtcacaaataccaacaatggcgtttcactgacaacaatgatgaaaaacatcgaagaaaaggaaaaactcgatgccgctaaccgcaggaaagcacaggaggagcaagaacagaaacaggcagacaatgccccgtcagcgccagcatcacaaaaggccgatcaaacagccgtcaatgtgatagccaacggcactccccaaaccgccagtggagatccaaaccaaccacaaccattgccaaaatccgtccgacaactgatgggcgacacaatggtgaagatcgacaatcaggaaccaggcgaaaaaaaccaggaaagagatgatttacagggcagtcagtacgcagacggaaaggtatcccctgtgctgaaccgccgatatctgttatctgcgggaacagcattatcctgtgtgctcaaaacgaaaatcgtaacctcttatcccggtatcacaatgtgtcagttaacacgagacgtctggtcggataacggcgaagtgcttcttgcccgtaaaggagcattactgatcggggagcagaataaagtcatgacacagggagtagcccgtgtgttcgttaactggacaacgctcaaagatgaaaatgtcaatgtgcgcattggcgcacttggcactgacagtctgggtgcttccggccttcctgcatgggtcgataatcattttggtcagcgttttggtggtgcattgctgctgtcattacttggtgatggtttagatattctgaaaaacagcacgcaacaaacaggctcaaacagcaatatcacctacgaaaacacatctgacgcaacaaaagaaatggcaaaaacaacgctggacaatacgataaatattccccccacggcatatattaatcaggggactgtattgtctgttattgttccgcgaaatatcgacttttcatccgtatatgaacttcagtaattcagtaaagcaattgatatgaataacatcagagataccagtaatacatcacaaccacgagataacagtaaaaccgcaagacgatatctggatatgacgggtatccagtctgttcttaatattgaacatgtcacagaaatatctgtgaataaaccaggaacaatatggtttgaaggaaaaaatggctgggaatctaaagatgcgccagacgcgacttttgataatttaatgacacttgccaaaactctgacgaacttatcaaagataaaaataccacttagccatgataatcccattgcatcggtagttcttcccggtggggaacgtggacaaatcatcattccacctgcaacagaaaataacagcgttgtgatatctatccgtaagccatcattaacgcgctttactatagatgattatgtccgaacagggcgttttgataatgtcaggattgcgacgaaacacgaagccatcctgactgaacggcaacgctacctgtatgaattatcccggcgtccagatggtcaatctaaagctcaatttttaagagaggcagttaaagaccgtcttaattttttaatcgtcggtgggactggctccggtaagacaactatagcaaaggcaattgcagatatctttccacctgaacggcgttatataaccgttgaagatgtaccggaaatgtctctgccgctgcatccaaaccatatccggcttttctacaaaaaaaataccgttgaagcgaaggaaatcattgaagcgtgtatgcgattaaagccagatcacatctttcttgctgaacttaggggtaacgaagcatggagttatctggaggcgcttaatacagggcatgaaggctcaatcagtaccattcatgctaataatacttatgcctcattttcacgactggcaagtattgtaaaacaatctgatgttggtatgactgttgatatggacctcatcatgcgcacgataaaaacatcaattgatgtcattctttttttcaaccataccagaatgactgaactgtattacgaacccgaagaaaaaaatcgctttttgagcacaatgtaaattctggagataactatggatgcaaaaaagacggggggattaattctcttcctgttactgcttcttgtgggtgtgcttatagcctcaaactatctcggtggatacacagcattaagatattcatccgttgatatgtctttgctcaagtgggatacattccattctgtaatctcaacattttctggcaacccacaatataaaaaactcgtttttatggcatggtttggattcagcgttccattaatattctttgccatattcatgttaattgtcgtgattgggattatgcctaaaaaagtcatctacggtgacgcccggctcgcaactgatatggacctaagtaaatcaggttttttcccggataaaaaatcaccttacaaacatccaccaatactcatcggtaaaatgttcaaggggagatacaaaaaacaatttatttatttcgccggacaacaatttttaattctttatgccccgacacgttctggtaaaggggtggggattgttatccccaactgcgtaaactatccaggaagtatggtcatactggatatcaaacttgaaaactggtttttatcagccggattcaggcaaaaagaattagggcaagaatgctttctctttgcgccagccggatacgcggaaactatcgaccaggccattaaaggacagatacgctctcaccgctggaatcctcttgattgcgtcagtcgcagtgatttacttcgtgaaacggacctggcaaaaattgctgcaatccttatcccggcaagtgatgatcctatatggtctgattctgcacgaaacctttttgtcgggttaggactttacctgctggacaaggagcgttttcacctggaacagaaagccaaaggtcataatgtaccggacgttcttgtttccatcagcgccatactgaaaacgtcggttcccgatggcggcaaggatctcgccgcatggatgggacaggaaattgaaaaccgtagctggattagcgataaaacaaaatcattcttctttaagttcatgtcagcaccagatcgcacaaggggaagtatagaaacaaacttttcatcaccgctgagcatcttcagcaaccctattactgctgaggcgacgaatttcagtgattttgatatccgggatattcgtaaaaagcccatgtcaatttatcttggtctgacaccggatgctttaatcactcatgagaaaattgtaaaccttttcttctcattactggttaatgaaaactgtcgtgaactgccggaacacaacccggacctgaaataccagtgtcttattctcctggatgaatttacatcaatgggtaaatcggaggtcattgaacgcgctgttggttttacagcaggttataaccttcgctttatgttcattcttcagaatgaaggacaagggcaaaaaagcgatatgtacggtcaggaaggatggaccacattcactgaaaacagtgctgttgtgctttactatccgccgaaatcaaaaaatgctctggctaaaaagatttcagaagagattggggtgcgtgatatgaaaatatccaaacgctcaatatccagtggtggtggtaagggaggaagttcacgtacacggaatgatgatgtaatagagcgcccggttcttcttcctgaagaaattgtgtctctccgggataagaagaataaagccagaaatattgcaatccgtgaaattataaccagtgaatttagccgaccatttattgccaacaaaataatctggtttgaagaaccagagtttaaacgccgcgtggatatcgcccgtaacaatcatgttgacattccaaacctgtttacacaagaagtcatggatgaaatagcaaaaattgcagaaatttatctccctaaagctggaggaaaaaaagtcatggttgccggaggcaatgtgattactaatccagaccttgataatcacgataaaacagacgtatctgaataatcctcgcaaccagcaaatagtattttgcatattccataaggtaattaaacatgaataaaaaattgctttgtttattaatatcctcttttttattatcaggctgtgcaaacttcaaaaaaatcaatgctaatgaacttgctgccgaaagagacgcacaaaaagcgactgaatacgcgaaaaaaattcgtaataacccggttatccaggattcaacaaaacaatggattaatacaacgccaattattgaaaagcaggtaaagcaatcagcgccgccctgcccgattgtgattaatactcgttcagatattgagctacgccagatcgcacaacgcatcacacaaacctgtcatatcccggtacgaatcagcgccgatgtctggacctatctgaacggtacaggcactggctcaacacaacaaatgacaggctcaattccagcacctgatgcaaatggaatggttcctctggcgtcagtaggcagtcagccagtaaaagtctcttctggcggtacatcactccctgaactgaatatctccgggcttcctgccctactgcaaaccgtatcttcacggctgggaatatcctggaaatacgataaaggtcgtatcacattcttctatctggaaacgcgctcattcccgattacatatatggacagcaatgtggcatacaactcaaaagttgtgagcggcacaatgtcttccagtggcagtaccggctctacaagttctggcggtatgactggcgacgcatcaaatacgcaaactacaaccgtggaaatgaaatcatcgctgtacaacgacctgaaaagcgaagtttcctcaatgctgacaccaggtacagggcgcatgtatctgtccacaggttcactgacagtaacagataccccggatgtactggacagcgttcaggagattgtgaacaagcgcaataatgaaatgagtcgtcaggttgtgctgaacgttgaaatcctgagtatcaagaaatcaagccaggaacaggcgggaatcgactggaacgcagtatttaatgatggtcatcttggtctgagtcttggtggctcatttggtgatgccgccgagaatgttattaccagtggtgtatccatcgtggacggtaagctggctggctcaaaagcatttctgaaagccctgtcgtcacaaggcagcgtcagtgtcgtaacgcaaaactccgctgtgactaaaaacctgacgcctgtccctatgcaaattgccaatcagcagggcttcattgaaagtgtcacaaccgattctaccgccaatgtgggatcatccacgtcactgaatgcggcaacaataacaaccggattcaatatgactctgcttccatacattcagccggattcacaaaacctgcaattgctgttctcaatgagtctgtctgacaaacctacttttgaggtgttcgaaagtggcggcagtaaagcacaaacaccgaatgtggatttgaaaacaattaatcagactattgatctgaaatcaggccagacagtcattctgagtggattccagcaatcaaaccggaaaaccagtaagcaaggtgtaataaccccctccttctttggacttgggggtggcgttaacagcgaagacggcgacacgattctggtcgttttgattacaccaaatgtgcttaattccggctccagtgcagtaataaaaaatgtgaactaattaactgaaaactccctgaaaaaacacagggagtttttttggaggtcactttgtctgagaataatcagaataaccagaatttcacttcggttattaaaaacaagcgtgcttttttctccggtctggactggaaaacgcttccttcagaagaaaagaatgcgcgtacattcgcaagaaaaaacgacgctgaatattttctctcctgtcagtatcaggattcagaaaatgaaaccaaaacgatggtggcatttatcagaaaagaggatcttcccacaggggcgtcctcattctggtcactggcactgatgataaaacccctcatcgaacctgacggatacgctatctgcgaactcggtgatctttatggctttgtttcctgcgtcaataacgttctcgtcaacgatgttgtaggtaacaaaagtcagatcatgagtgctctgacaacatttcttgagtttaatgaaacaccagaacccggctggaaactataccagcctgaatcatgggatatcagccaggcactcccctcactcactctgtctgcgttgattgacgtaaaaaaaccgccgaaagaggcggcgtttactcgcgtatcccgaaaacgtcagttcatgatttatggcggaagtgccattctggccatactgctctggaacgggatcaccatgtaccaggaataccgggaaaaagaagctgcggcagaagctgcacgtcttcgtctggcaaaagaaatggcagacaaacaggcaatacagattgccccaccgtggcaacatttacctgaaataaaaccatttattgataaatgcattgataaatgggatgcactgcccttatcgatcgccggatggcgttttgaccttgctgaatgcagcacatccggtaatgacgggctgttacgcacatcatataaggaactgagcggcgttacggtcgaggacttcagcacacggatacgagaaatattccaggggacaaccacagcaacttttgtattgccagaaggcagcgccgggggattttctcttcctgtcagttttgacgtttcgcctgatccaattaccccggacacattgccacaggcaacagatattcaggaacgcctgacaacatttgcacaaaaaatgaggttaaaactcacctggcaggaaattgaaaacacaaaaacagatgaagaaggccgtccaataattctcccgtggaacgagtatgaattaatgattcagaccagcaccccgccttcaatacttttcgctaactttcatgaacctgccgttcgcttccagtatgcaggaataaaactggaagaaggaagactgaattatgagattaaaggtgcattctatgttaaaaataattaaaccaacgattatttctgtctgttttttcagttcacttgcttacgcaacagaatctgaaagcacaccaaaagacgaaataaaatattcatctccgaccattttacaggtagagcagattcaggctgaaacggtaatttacgaagcaaagctggcgcgtcagaaggctgtcagtgaattgcgtaatcttgatttgaatggtgtagcgtccgcaacgccagcaataacgccctcttccgggtattcttctcttgcagataccgatataccagcgcaacgtgtagccgctaaatcacttcgtgttattgaaatatttggtacaccacaacaaatgtcagcacgaatttctctcctggacgggtcagtaactgatgtcaaggtcgggcaaagtattcctggtacttcttataaggtggcatcaatcactggtaatggcgtctggattcagaatggtacagagaaacgccagcttattctttaatgctattgaaagagacgacacataatgtttttttctgacgcagactatcccggaaaagatatttctgatgttgtatacgtcagtatatctgaaaaagacgataaacctgttcaggtttatatcgctgataacagtaaaggacagcgtgctgttcaggcttatattggcactctgaatgttaaatatcccggacaggtaaatataacctcgacaactcttgatgttatcgcatcccgctaccaggacagcgaaaaaaggtctgattcaaactcatcacaacacttaaacagcaaccaggaaaaggtcattagctacctggcgaaagcaaacaaactgggaagttccgatttgcacatcacacctggtcgggacggctccgagttcacttatgtcgaagcacgcgtgcatggggaactggaaattctggatgtcatcccgcgtaaagaagggctggaattgctgggtgctgcctattctggaatgagtgatgttatcaaaggtacgcagtttgaccctgcaataccacaggatgcacgtatcgcagagaattttctgaagcctgtaaatctttttggggcgcgctattcgcattatccgtgcgtgggtggtgtgtacgcggtcttccgcctgattaaagatgacagcgaggatattcccactttcgaagaacttggctacatgccgcaacaaatccagacaatcaggcgaatgttacaacgcccggaaggaattatcgttttatccggccctacagggtccggtaagtcaacgactctgagaacggcttcagaagcctatctgagcacgtttggtttcaaccataacgataatatgcgtctcccccgaaaacgccttttcaccattgaatcaccgccggagggccgcattcccggcgcaatacagacggcagtcagggattccgtcgatggctgggttgacgcgattaaatccgctatgcgacttgatccagacgcgatactgaacggcgaaattcgtgatcacgcatcggcattagcagcaatcaaagcctcgatgacaggccaccttctgttgacgaccttacacgccaacgatgccctgaatattattgagcgccttgaaatggagaatattcaggccaggctgattgcagatcctcttctgtttatcggtctgctgagtcaacggctggtacaaaaactctgtccttactgtaagcgcacttatgctgaaatggcagacaaactgagtacagaagaacggaaactcattgaggaaaattgcctgccggaacaggtccggttgcgcaatcttgacggttgcgagcactgttataaaggcgtaacgggaaggacggttatagcagaagtcgtctcacccgacgcacgtttttttcagttatatcgtcagtccgggcgtctggaagcaaaatcatactggcactatgaacttggaggaattacccgtaatcagcacttattacacctgattaatcatggcctggtagatccgctgtccgcacacttcatatcccccattgacgaagataaatactcaatgctcccggaggggacatggcgataaaagatatatttgagaaactcaattcgatagaaattgatttctctggaatatcccactggctggcaaaatacacattcaggtattccagaataagtttatatgaagatttatctggaatgttaaatgatggcataaatgtaaagcgtgctcttacacacctgattgatgtagaaacagactacgggaagaaaacggggtcttctgcaacctactatatttgttgtgagtgccttaatgcactgaataacacaggggctatatcttcagcattaaaaaaatatataaaggaggatgaatatcaattaatatccagcggtgaaattcgcggcgaccttgccggaggattagttcaggccataaaaattgtcagaagtcgttctgaaatgacaatgactcttgttatgtcgatgatttatccatccgtactggtttttggttgtctggcaaacatgtatatggtccacgataccataacacctgttttcctttctctcgcaccgaaagaacgctggacaagttctatgcgattactgacagatacgtctggtttcctgatagaaaacggaacgtatattctctgcttctgcatcgtactgtttttcctgatcagatattcgcttgcgcgttatacaggaccgggccgtcagtatcttgattacattcccccctggtcactttataaaacatttaatggtgtaagttttctcttcaacatggcctccatgttaagtattgatattcccgttgcaaaagcactggaaaggctggagaaaaacagcactcaaaacagatggctactcgaacgaataaaagaaatcaggagatatgttttacttggacagtcacttgcaatggcaatgaaaagttgcggttatgacttcccatcgaaattatgcattaacaaactattacttcattctgaaaatgctgacaatgcattgatgatgtctaactatgctgataaatggctggaggaagcaaaaggaaaagtcaaatcaacaggagtctggataactgtagtatccgcattaattgttttcgcatttattgtaatgatgattactgctctctacgatgtcagtaacgtcctgcaacactaatccctaatatttttaacctctcaataaataaggaattatttattatgtcttctattaatattttaaatatgcgttctgttttttcttctctttctgcacgccgtaaaaaagaacaggacaaaggggcaacactgatggaagtgttattggttgttggtgttattgttgtacttgcagcaagtgcatataaactctattcaatggtgcaatccaacattcaatcatccaatgaacaaaacaatgtcctgacagtgattgccaacatgaaatcactgaaattccaggggcgttatactgacagtaactatattaagactctctacgcgcaaggattactgccatccgatatgatcgcagatacaactggcgcaagcgcgaaaaacccgtggggcggctccgttacaatcacaacctcttcggataaatactccttcaatgttgttgaggccagcgtaccgaagaaaaactgcatggcaatggtaaacgccctgcgttcttccagcgcaatctccaagattaacaacacttccacatcaactgtcgatgcggcaactgtttgctcatctgacagcaatacgctgaccttcagcactgattcctgatttttcatgtgcatcggataagcgccttcgggcgcttattttttccatgtttacaggaggagtattgtgcgttctgttctttatatcctgctatcatgtatttcatcattaatcttttcattgcaacccgcatattcagcgacaacgacccaatttgatgcctgctttgcacaagccgggcaacgttatctgattgatcccctgcttctgaaaagcattgccactgtagaaagttcactcataccagaccggataaatcacaacaaagaaaaaggaaaaatattaagcaccgattacggactgatgcaaattaattcatcacacatccccaacctgaaaaaacttggcgtaataaaagacaaatcagagcttattgataacccctgtctcaatatacaaattggcgcgtggattctggcaacacattttcagaaatgtggcataaactggagttgtcttggcagttataacgctggtttcaaagaaagtaacgaacagaaaagaatcaaatacgcacgctatgtctacaataaatacatggtaaggtaacttatgctaaacagcatatttaatacggcgatactttgctgtgcaaatatcgtctgtcaatgctacgcctacaatgaagtaaaattccgtttaaataaacttaatgtatcttataaaaccggcacagagaaatattactgtctgatactgacaacgcttgccgttctgtatctttcattaaaccagctatcactgattcaatctataatagtgattgttttctatgctttccttacattaatggcttgtatagaccttctttcatttctactaccacgcctttataccgtgacatttatcttctctggcctgttatatcagacatggaataacaatatattgtctggtttgttttgtgcaatgctgatgttcttcattatgctgtttgtaagactttactttgcatataaaaacggaacggaaagtttcggcatgggagatgtgctacttattgcaggaactggcgtatggtttccaacgcctgagattgcctgttcaattgtatttattgccgttatcggcggaattattttcttcactcttggcggattaaacaagcaaaaaaaatatatcccattcggtccgttcctttgtggcggaatgtttgtttactcactcgtaccgggaatattattctgaggattaagagcaatgaaaaagacagataaaggtgtatctcttcttgaggtattacttgtcatcggcataatggtgatggttatccctaaagtttatgaaaacattgaaaaccatctgaataatgttcgctggcagaatgcagcagaacacgcaaatacctataacaccgctgttcgtaattatgttgctgacaatgcatcaacactacttgctggctctttacccaaaacaatcacgccagcaacactcattcagaaaggctatctgaaatctggtttttctgaatccaattttggacaaagctacattaccggtattgcaaagaacagcaaaacatcccgtctggaagccctgacctgtagtaatggcggtcagtccctgtcagaagccggaatgcgctcggtagcaagcatgattgaagggcttggcggctacatcaacagcagcaagcaggcgattggcgcgggtggcggctggtctgacacgccttcaaattacgggctgaactgcgcgaccgggcatattgcaatggcacttgttggcgctgatttgcaggaaagcgaccgtttgtatcgttactccataaccaatcgtcccgaccttaacaggatgcatacggcgattgatatgaacagcaacaatctgaacaacgtcggcactttaaacggcaacgccgccgcgctctccggcgatatcagcgcacgtaacggtacgttctctggcgcaatttcaggaaatacagccacaaccaacggcgatatcacttcgaataatggctggctggtcacaaaaaacagcaaaggctggatgaacagtacctatggtggcggctggtatatgtccgattcgtcctggttgcgcagcgtgaataataaagggatttatactggcggccaggtaaaaggtggaactgtacgcgctgatggacgcctctatacaggcgagtatttacagcttgaaaaaacagcaacggctggcgcttcctgctcccctaacgggcttgtaggccgcgacagtacaggggcgatactttcgtgccaatccggtcggtggtctggtggcaataaagtgaactactccgcctgtaagtggtatcaatcatctgtagcaatgaatcacttcattggcgggaaaagtggaggatctatctactacaaacccattcaatgcccgaccggatttatcatgacaggtacacgcatgtatggcattggtgatggcgttgatgaggaacacgttgatgcttattgttgccccttcggttaaatcccagcaccaggaagattcaggcatgtaacagtaattgtgccgccggactcataatttccccacgcataattattcacataccaaaccttgttttggtcggagtatacctgctgaaacccaccaaaaggcgcaccattaaggtatgtccacgaacagtacgcatgtacgccaatgctcagatttcgggtgtttttcccgatattgtacgtactggtagtgaagttcacttttgccgttgtccagataccggattggcactggcccccgtgccaatccggtacgtggagaagggcatcaggtagcactgttctgacaggaaaaatagcaaatggacaacagatcccattgccatctggtttttctgccagccagtgtacctggagtgtcagtaatgcagaaaatccgcacgggtggaagccgaattattttgcggggtcagttgcaacctatgatgccaatcgaattgtgaaatgcggcttctatgacgaatacaacttttatggcggtactcaccgaactgacctgtcggggaaatgtagttacatcgtggtttgccagtgataagtatcgtcactggcaaatggcgtaaactgtaattgaaccattttgatcttcggtcgtgtcgcaactggcagtccatgcattgttgcctgaaggcatggaacgcgtgagccatataaatccggtatttgatctgcattgaccgcctccaccaatgactttcttgccagatggacatgttgccgttgctccaggccaacgccacgcagtagctgaagcggtaacaatttggctatcacctgcgccaatttttttccacgtaccggattggcacggaggccagtgccaatccggtgtgtggagggcattaggtggaaagctcaaggttactcaactttccagcactggttacttggggcaatttgacttttgtgccattgccagaatgggaaatgctgaggattctcattactgccaggtagtcgagagtccatctggttcacgaaaatggtacaaatacgagcacaagacaggttgtattgcgtcctgtgtaactctcaattaagtttggtatccaaaaactgaaaatacccctgagccacaagagtagttttgggccggataagaggtgatctgataagttgcgccagcagggacagcaaaagagatgaatgctgtcttcccataagatgggttgttgctcgcatttgtgctaatcaatacccctgcaacgtatccctgcaatctggatgtgttagcgcaatctcccccggcggaaccaccattccctccagaggcgtaaacaaacagcgtaccacttcctgtattgcgaccagtaaatgatcctctgtgtgagccaagattactgtaactaccgttagaggaaccggaagttctccacacaccggattggcacggtgatattgcatttcgaagcaagaatctctaccttccccccttttttgtctggaggggatatgtttcagaaaatcaaaattcgcaaaatgacaatcagccgggcgctggacaaatacctgaagacagtatccatccacaaaaaaggccatctacaggagttttatcgcgtaaatgtgattaaacgtcaccctattgctgaacgctatatggatgacattaccactgttgatattgccaattatcgggatcaacggttggcgcaaattaacccacgaacggggcgtcaaataaccggaaacaccgtccgtcttgaacttgccctgttgtcatcattattcaatatcgcccgtgtggaatggggaacatgccgcatgaatcctgtcgaactggtcagaaaacccaaaatcagtagcgggcgcgatcgtcgcctgacttcaggagaagaacgccgactttcgcggtatttcaaagaaaaaaatcaggctctttacgtcatttttcatctggcgctggaaacagcaatgcgacaaggtgaaatcttgtcattgcgttgggaacacgtcgatctgcaacatggggtagctcatcttccaacaaccaaaaacggtgctccacgcgatgttccgctatccaggaaagcccgtaattacctgcaaatgctgccgacacagcttaacggtaatattttttcttatacctcttcgggattcaaaagtgcctggcgaacagcacttcaggaactgaagatagaaaacttgcattttcatgacctccgtcatgaggctatcagccgatttttcgaacttggtacattgaacgtcattgaggttgccgctatttcaggccatcgctccctgaacatgttgaaacgatacacacaccttcgggcttatcaacttgtcagtaaactcgatgcccgacgcaagcaaaccagcaaaatcgctccctattttgttccctacccggcaacggtcgagaacagaaacgggcaagtcgttgtgactctgagtgatttcgacctggaaacaagcgcagccacaaaagaacaggccatatttcatgccagcgtgttgctgctacgaacactggcacaagccgcccagcgaggagaacgcgtccctactcctggcgaacttcctacaaacattgatgaacgggtaatgatttgtccattaacaaattagaggattcacttatgatagaacaactacagagtgattttttattctggatatttatttacttcctgatagtaggtttgcttatcagaaacattcatcttaccagaaaaattaaatccatcgaaaaaaacaaaatgttcccagcggaggaatatgctgtcctggacattgaacagcatatgtccaataaatatattgggcggctagtaacccgttttatgaagagaactaatggtgcacctttgttaattgtgtttccagaatacgataaaggagacaacaatgaagacaaaaattctccaccattccaacttgtaaaactaacatccaacatcaacaatattaaagaaatttattccaatgatgacttaaactgttttctgaataatatttcggcacaaaaaaatttatatacaacgcactctggacctagccaggcatggattgaacatgcatatcctttgcaacaagtaactattctcttacaaggcactcgtcatagtgaaagggaagatataatcagtcaacttgagattattctttccagactaaaaaatggagaaaatacaggttttgagcatgacgatgattttggatattcatttcagtatgatgccgcagcagtaggaaaatcatcatttttcgatgaagcggcaggaagaaaataagaataacgctctatccattgcacagacaaattaacgttaatcttttatgaaaatcttattaacaatatttatttatctgcttaccgcttttcagtctgcaaatgcaggtggaataccttatacatttaaccagaaaattcttcaggggaaagttattcgcgttctcgatggcgacaccatagaaattaaaacactacccgcaaaaattgttgtgtatgaagttccgatccgagtccgattgataaacatcgatgcccctgaaaagaaacaaccttttggacgctggtcaactagtcagcttaaaactctggttgcaggtaaacaggtgacagtctcttattcacataaagaccgctacggacgcattatcggtcatgtgttcacgacgaacggcacggatgccagccgctttatggttcagtctggcgctgcatgggtatatgaacgttacaacgtggatgagtcattaccggctctgcaacgggaagcgcaggaacaaaaacgtggtttgtgggccgatgcaaatccggttccaccgtgggaatggcgtatcagaaattaagggggcaagaaaatgcattcttcttttggtttgccatgattctgtctttttatctttgtgcaatattaaaggcttctttttaacagggggcggcatgtatgtaattaatcaacagacaagggacaataatattcttacgttgcatgatgtttttaaaatctatcaaaatacaggggggcttcgtcttgtaaaaacagaggagaatgaaaagtacatctccattatcatttgtggcgtttttcgtattagaaaaaacaaaaagaataacaaaatcactttgtggggatacaagctaagagataagcacactggggtatggaccagaagaaattcatttcctggtaagatttttttattctggtctaaaaaatctgcatacgacatggacgactggttaaaatatgcgattagctacatcatcaaatcattgattgaggctggatattcaattgaagacaaactctatttgttacgcattggagaggaagaggaaaacagcgagagtcgttatatttccacactatatccatccaatgtatattactcatatgagtatggaatacatgacattgttcattgccttggtaaaatagcatcattcaactacccctataatacacgatatatcagcagacatattttactcgcagagataaaaaacaaaatttatcagagagcattaaaaattataggggtggataatgaatttaatgcttcaaaagcattgagtaaagctatatggataatggtagataaaaagatatttgcacaatatgccagagcttcacattgttcgatagcttacaattcaattcgtcaggcattatttgaggactatctggatttttcaaagcgaatccatattgtgaatgatatggattttttcggattgtggcctatggttggtcgtctaagacaacaacataaaaatggtcagtttatactatctggaaagacaaaagagttatatgaaaaaatcagttttccctgcaaacttagttatggtgagttcagaagtttacgacatgttagtttgtcattagtatatgctttaaatgataaacatgataatgcatcattcagatttacagtcagattattacgccatccacttatcaagaactatcctgtgagagcaatttactggattatcgattatattagcattcgagcttactcagaaaaagaaaatgatatttatcgtatatgctcaaaatggctagaatatcatcgtgatttatttaaaaacattggcttttatgaccgtaatactgaatccaggcaaacatcacgctgggaaatggaaacgaatcagttgtgtcatgcaattgactggttgttagcagaagaacggttaattcataaaaaccaggagtggccttctttctggagactatctgatgaatggacgcgacaagtgaagaataacgttattcccgtaatcccaaaatggaaaggaactgggataaactggcagaaagttgataacggtgtaaatgaattaattacatttgatgctctgtgtcaggaaggtcaggagatggaacattgcgttgccagttatgcagactggtgtgcatctggagaatatattgcaatttcagtcctgatggataatgaaagagccactcttggactttcacgaaaagaacatgatttaacctatcagtttgaccagatgagaggtattcgtaatcaggctgtttccagaaacatgctaattaaaggcaggcatattttaaaaataatcaactcatcactaaaaagataatgagtcatcgcatctcattacagcaccgatgactgggtgtttattctttctgaatacaaaaactgactgaaagataaggaaagaaagttttcttacctgtttgtcttacgcaatggtgaactggttcaccatgaggtcaacaaatcagagcttctttgagaggtttaacatgcaatatgcattgcttgatggatttgaacgaaagtttttgctggatgctcttgaattcggtgttctgaaggactggaaagaaaatccggtaaaagaacttcctgatattgatgaatctgctcaccccttccatgtctgttatggtggatatttattaaatcctggtgtttcagattcagatattagcagaaaaataaaagaccagacaggattctggctggcagctattgatgatacccgcatggattgtcattcaatagcttattatgatattcacacactccctctgatttcgtgtggtcatcaaaagatagttccttttgccgcgttaataaaagctgatgaatgcatcatttcaaaaatttcttcgtattctggttttgccgtaacagcctttttgagaattaaagaccaggatattgcaactaatatacttaaccgtgaggggatttttgcttttaatggctgtgaacgcagattcagacatccagtaagtgaagataactggcaacaggcagtatcagaagaacgtgctatccgttgtgccaaaagattaattcaatgtaaaggataacaaaatgaaactttttatcgcagaaaaacccgcagtagcgaatgatattgttaaggcgcttggtggcaattttacccgtcatgatggctggtttgaaagtgataatactattgtgactaactgttttggtcatattatcgaatcacagccccccgaaaactataatcctgaatacaaagagtggaagattgaaacactccctttgcgtctttatcccgtaaaataccagcctgtagaaagcgccgaaaaacaggttaaaacgattattgagcttatcaggcgtgctgatgtgaccgaaattattcatgctggcgatcctgatgacgaaggacagctacttgtcgatgaggtcctggaatatgcaggcaacacaaaacccgttaagcgcgttctgatcaacgacaacacccttccggctgtgaaaaaggcgctggcaaatcccaaaaataaccgtgacttcagaggactctatctcaaggctctggcgcgttctgtagccgacgcgatatacggtttatccatgacgcgtgcttacacaatcccggcaaaaactaaaggctataaaggtgttttgtctgtcggacgggtccagacacccgtgcttggcctgattgtaaatcgcacccgtgccaataaaaatcataaatccagcttctactacaccatgaccggacattttcaacgcggcgctgatgttatcagggcgaactggaaacctggtgagttcgcaccgctgacagaccgcaaattgcttgataaaacctgggcgaatggaacagcaacatcacttgcaggaaaaccagccacagttgaagcggcagcaacagatgataaaaaaacggctgcaccgttgccctttaacctggtacgacttcagcagtacatgaacaaaaaattcaaaatgactgctcaaaaaacgctggatatcacacagcagctacgcgaaaaatacaaagcaattacttacaaccgttcagattgttcatatctttcagacgaacaattcagtgaagcaccacaaataatcgatgccctgaagtcggtgtttgatcagccaatggatattgatacgacacgtaaaagcaaggcatttaacagcgcaaaagtaacagcgcatacagccatcatcccaaccgttagcgtaccggacgtaaacgcactgagcaccgacgaacgcaacgtttacctggcaattgcacaacactatcttgtccagttcatgcctgaaaaggcatatcaggaagtatccgtcgccattcagtgtggtgatgagtcgttttatgcccgtgccaggaaaactacagacagcggatttgaagcgtttcttggtgtggaaaatgccggggacgatgaagcagaagtcgaaaatgatgattccgcttttgatcttctctgtaaaattcgcacaggagaaacagtgacgacaaaagaagtggttgtgaatgagaagaaaacaacgccaccgccattattcaccgaagccactttacttgccgcgcttgttcgtgtcgcagattttgtcactgatccagtgattaaaaagttactgaaggataaagatcgggataaaaaagacgaacatggcggtattggtacgccagctacgcgggcttccatattggaaacactgaaaaaacggaactatatcaccctggaaaaaggaaaacttattccgacagataccgggtatgcgcttattgatgctctgccggatatagctgttaatccagatatgacggcattatgggcggaaaaacagacactcattgaaaacggagaaatgaccatcgaacagttcgttgacgaactgtacaatgatctgataccgatgatcagtaatgcgaacagtgctgaaataaaagtttcccccagcgcgccgtctggtcagtcacaacgcctgtcctctccttgtccttcctgtggtaaacagattgttatcaggccaaaaagctattcctgtacaggatgtgaatttaagatatggaaagatttctgcggcaaatcattaaccgataaacaaattgaaacgttaataacaaaaggagttacaagtgaattgaaaggtttcattagtcaaaaaacaaacaaagaattttcagcaaaagtaaaactggttgacaaagcaaccgggaaactgggatttgagtttacacaaaaaagtaagaaataaatccagcagtagaaatcaaacatcgttgtagctactataggacaaggatgttcttcaggaattgtacaatgaaaacaaaacaagactggctctttcagttaagacgttgctcaacactcgacacacttgaaaagattattgaaaaaaaccaaaacagcctccccccttctgagcttgagtcgtttaatgccgccgccgatcacaggcttgcggaactcacaatgaataaactctacgataaagtccctccatccgtctggaaatatgtatattagttttcatctattaatattagatgtttgatcgacacaaacatcagcaatccctatacacctttcatagaatgaattgaaccctgtatatagcctgtctgaaatggatatctggcaggctatcttaatagtgttataggtggtatgaatgtttttcctctacgagacctacaatttcttctactacctgataaagttaattgtcattcagccacaatatatttgtgtctatatgatattcttttttttcaatgcagggatagcatatagcatcaccaatgatatcgaggatcaagtatgtcgatggcttttattcgtaagtatgttacatgctctgatgattccccccgcagttatcatgccacttatcatgccaccacaggaaatacttcaggaaacagagaaaaggcaggaactacatgaatcaatacccaaaacatgcaaattaaaggcactggatgctcaacaaggtggtttattcggcgttgataaagatgaatgggtattccctgacaataaatcattctatctgcctgaaaagtaccgtccagaaaacaggattacggaactagccatgatgaaagaaggataaagacctatgaagatattcaaattgtttgttctttgtatcccccttctgtttagtctttttttcgctggctacggcattttgtcaaaaaatccatttgaaacactaccgtgtctgtccgccagtgctttttgcctttttctgtttgacatactgaggcgatcatttatgaagtgaggtgtcttgatgttaacgttgaggttgagaaagttttgttggttcttataattatagaccggattaaatcatgaaagaatacgaaaaaacggctttaatatattccttaaaggaaagcaatacattagttcttcggattatactaatctctattttagttgtcggggtgatttcaggcgcgatatacttatataacttggcgatctcgttgtttgattcaaacccaacgtctgtgcaattcaccttttgcggagtaggctgttttattgctctattacttcaatggatatctaatgttgatgcaaattacagagaaagaattggggagcaaccaagtacaataaaaaacattgtacaatatttatttgcagccattattaccattagtttcattacaatggcattaacagccatattagtcttaaaagactcgtccaacatatggctcaacattacttttattgcattattactgtccatttttgtagctattatttctgtttggggttgactttttttcttaaaaagcccgaaaaccgggcttttttcttaattagtgcatgtcctgtgaatcgtcacgctgctgctgcgattcctgatgatcttctctggcctggacaaattgttttccaagagcatcttctgccatttcacgagtgaatccgtgattaagcaaatcggattcggccttctccctttcgaacttcagtccttcccctctgaacttgtcctcaaagcgatcaattgcctcaagaatcttgccgtcttccggcgtgcaatcccgtccctgtgctttctcaatttcatgacgctccacgcgttcagcatttttcattacagcgtcaatcccctgagaaatatgttcagactcgacgcgataaatgacagtatcgcgcttattgagatcatgtagctcgcattcaacccggccccactcaatagcatccttgagagagctgaaatcttttatttcagcattcagaccttcatgtgttgagaaatagacataatccttctgttgttccagtttattcacattttcaatagcccttgtactgaaatggatacctgtaattaccggaacacgagccgatgtttggtcccccgttaaaacttcagaaggtgtttttccagtgatcgcggcaaattgctgctccgtaacatccactctggcaactgcatcaccacgctctaagccatgcttaccagcgaccgcaaggcgataaagaccaccttcccccctggtaatttccgcctccacaacgatatccccattgcaggaactgaactgagaacggtctttaaccaggaagttttcaagcccggagatcatatgctcgttagctgaaatactggcgagtatctcttctggtgattctctggacgaatcccccgcctgttccatcactgccatattagcgtcattaacagcgtccttaattcctttaaaggcgatttcttctcttgttacaggtgtgattaagatatcatcctggttaagcccgtgctcctgaagcatcttatttttatattcagatgcgtcgtgcaatgactcaaaagtcttaatatcttcactaaactcatccttcgaaaaagaaaccgcatacactggagtacggtattcttcatatgaattggcaattatttcaaatggcctatcaaacgttactaatgccccctctggataagaggataattcatcggttgagacagttttagacataagcacaacagtatcaaaaccatcaccatttaaataattgctttcatatttttctattgcagaagatttgctttcctcataacactgaatagccgcatctttagaatgaaagacgataccttcattcaaatcatggaagcgactaaagtttatacaataaatttcctgtttattatgcacctgcgcagtagcctgatcgtgttgagtagtaagctgctcctgaatcagagcctgtgttctgtcaatacctaactcattcacaattttgcaaaattcttttgcgtcgttttcattatcaaaactggcaacgtcaaaaatatcatcgctgtctccaggtacatgtcccagcacttcccaaatctcattttcatcgctatccagagatttcaaatagccaaattcaccatttgtgcctttactaagcatctgtgaatccagggtgtttgccctggtaataacaccaggatcatatgaagatgtggcctgctctgcgacctgtgcttgctccgcgacctgtgctttctccgcgacctgtgcttgctccgcgacttgtgcttgctcggtggcctgtgcttgctctgtggtctgtgcctgttcggtggcctgttccttcaatgcatcacctttctctattctggattcggactcctggctattttcctgtgtttccacctgctcaaacttattaccctgaagttctgcttttaattccagcatcatctgttgatactgctccgggcgtaaaataatcttcatgtcctgctctgcggcaacttcagcgcacatttttttgaaatcttcagagccggtaagtttgagtacaccaccaaacttttccctggaatactcaagcattattccgatctcttcttttgagggatttttacccgcaacgacaaagttccctttgtcggtaaagacaggcttttccgattcctgatcgcgataaacaatcctggaatcctgcttatccatcacaagatcttttagtttggtgttaacctttttcgcctcttctaagcggcgctgggaatccaccgctttctgaagcgaaagttcgggttcgtcagcagaaatggcgttgatttcatcgaagttgagatagcttttgagacgttcaagggctttcatttcatctttatccttatgccagtcagcatgatattgacgaataatgtgtcgcccatctgtgtcgagttcagaaagacgctcaagtgtggttagttttttgtaaacaatcacacccacggcaatatcacgctgttcacgtggtattaacttcaactcgcgtctcatctctcgcagatcattatacagcttgccacgctcaaacctgatagtatttcgtaatgttttttcagataaattcagtgagttaagacgctcacgagcttcatgatgcgtaaggcgtctgtaggttggatagcgcgtatatggcgtgttttctaactgctgtgaataaacttcaagcagaaaggatttcgcatctttccaggcaagattaatatgctttgtcagaaaatcagatgcgttcatattacgattccccacagaaaaccggggggaaccgtcctttgctgttctgattttatgctgcgctggaataatattaaaacgctcggcggcagaagacagaaacctgacaggatcaatatttctgcgaatttctgccatcgttgtaatttcgtttttctctgccgcctcattcagagtctgaaacatcgtttcacacaaaaaagaagagcgttcaagactttttattcctgactctgtgaattgtctatcataatcccgtcgcacatcctgaccaggatgttctctttgcggtaattgctctgccagatcacgctgcgaaatatctgacaatacactgatagagtcgggtcttgtgaatccattgattccgtaaaccataccgcgttggggcatacgtgacaatccgactgttgcttcagattgacggattctggcaaactttttaggacacgacttgtaacctcccgctcgtcctgacgtttgctgagaatttctttcgttaagtttttctcttgagtcatattcttttatcctctctttcagaaattcaatctgctctgcttcagataaacttgtatagtccttacgaacgctggcgttgagaaaaacatgtttaatctcgtgactggttttgtttacccaggtattgagacgtttttctatttgcttaggcgtaggtttttgaagagtcaactttccctcttcaatatagtttttacgaaacaacgggcttttcagattagtgaactttttatctcccggtaacttaacagcaatatattcactggcctttccttcatttcttatcctaacctcaccatattctgcaacaatctgtttgaatacagcataatcacttactttttctttttcaattcgataattcaattcattcttaaatgcagaattacgctctacatcaagatctgcttttactctctttaaaataacactataatcactattttttctcggaaagtccttcgggctggcaagattatatttattgttaatatgctcctgtattgcatctagctgttcgatagtatgacctttccctataaggccaacaggatcaagtttatctcctgtaactagattaacctttggaatgacaatatgaatatgaggctttctttcaattaactctcctgtactattatcctgaatatgccggatttttggcaaatgtgcttcagcatagaaagaatattcttcaggatgataagcattcatcaataattttttataatcatccacaaccgcctttaacatttcatttgatacgtgactttcatgaaaagacaacgtaatgtgcaaataacggtcctgtttgttgtcttcaatagaattgataatcttatctgtagtctggagatcaccatcaagaacaacacgatgatcaagttcatcacgtgtgtactgacgttctgctttgcgaccatttatcaggtaatcaacaataccgtcattaccaccaccatatctgacaatcatttggctatctcctgaaggcgatcacgaataccaatcagcacatttaaaatctttttataaagcgcctctgatataataccctttaaatgatctgagtttaagcggtgagctatctggttaatattattcccagcccaacttaactgagaaagacaccgtttgtattccgggatatggcgtttatctgatgtgtagttttttattttaccaatagtaagcagcctgaaaaattcagacttactaatttcaagctctctgattgctctgtcaaatggagcatactcttcttctgtaagtctgaatgtcacatgaacacttttgttggcttttttcttcataagtcctcaaggttcgtagaaccgcactagaacggctgcgccgttcggggttgcaaaggggcgtcccctttggcacaagcattgtaacatgcccggaacgggcttgtgtacaaagcttatcgtgcctgtgttttagaaggacaaaaaaatgccgtgcatacagcccacacaatgactcacataatcacccacaactcaaaacacacagcccacacaatcacccacactttaacccacaaaaaagaccacaaccccattgacaacccacaaaacaacccacataatcacccacacaaacggcgagcaaattgctttaaataaggtattatgccaatgtaggaggtagagagagagaggaaatgtaacaaatgaaaaagatcgagagtttattatctccaatatgcgaggctataaacgaaacaaaatcgaaatcaaaacaggctgtcttcaatatgtatttgcaaaatatacttgaagcaaagaaatattatacatgggagcaaatagctgattacataaacaacaacaccaagacagaactagcccaaaagacttatataaatatgacagagagggctaaaaaaagacaaaaatgcactgaaccaaaagaacaggcaaaaaccatagatgtaattgttcagaatgaagctaaaggcgatgaaccgagagggggggtaaaaggttttttttcaaacattagtgagaacaaaaaagaaatagagcacgatccaagtgctacgaatgaaaaatttataaataaatatctttaagtaaaggagcattataaatgaaaaactcaatcaatttcatccttcagggtaaaggtggtgttggaaaatcattcgcgaccgcaatactggcacaatactttattgatgaaaatcacatggataatatcgtagtcggtgacacagacccggttaatacaactacggttaaagtaaaaagattaaatgcagatttgatacaaatcactgaaaacagcaaagtaatacaatccaaattcgatccaatgttcgaatcgatgctgaccaatagtcagaatacttttgttattgacaatggcgcatctacatttttaccgttaattcagtatttcaatgataactgtgttatggacatgtttgaagatgtagaacaagacgtttatatccatactgttatcgttggtggacaagctcttgcggataccttgcagggatttgaagaactgaaagaactggttaaaggaagtaaggtaaaacttattgtctggataaatgaatttcagggtattccagcacttgaaaatatcccattaatagaaactaaattcattgaaaaaaacaaggatgtaatcgctggcgttgtggttattcaggacagaaaaagtgatgcctttgcctctgacatcaaagagctaacagaaaaatcactaacactgaaagaagctcttgagtccgaccattttggattaatggctaaatcacgattaaaacgagtcttcaatgacatttacaaacaattagatagcatctatgacgatgaatacggtgaataatatgagtacagttaatcagccagaattaaaacagcctgaaaaggctgtttccagtgaagatattgataattttattgttgatgtattcaaggagacagggcataaaatatcaaaagatgatccagttatttcattaatttttctgaaccaaaagatacaggaaaaattcagcaatgagttacaagctaacttcacagccctgtctgagggcttcagacaggtcgtttcatctgtagaaaatgactatattcaaagattcaagaatattgttgagacgtgcggcgatctggataatgaaataaaagaaaaagtagaagagggaaaaaacgatctaaaagaaacaagtgttgaggtaaaagaaaaattaacagatgatattattgaactcatatctggaattaaacgcaaccaggaaaaaaacaacaaattatatgaagaaaagttgaagtcattatctaaggctgtaaaacccttcagtacaagaacagccattgcaatttgtgccttgtgcacattatgcctgtctgcggcattttctggcgcaacctggtatgttgcacaacatgaaaaagaggcaagcctgcgcttctatgcaagagcttttcttgatatgaaaaaaataactgaagagagcatgagaaaattaccaaaatcagaccagcaaaatataaaactcaaactagacgaaattgattcaagaaaaccatagatatgaaaaggagtcactaatgacaacttttaccgacgacgacaagaaactaattaaagaaatcagggagcgaatcggcagcctggacgtgcgagacaatattgagcgtcgggcttatgaaatttctctggcatcgctggaagcagagccagttatgttctgtatatcaggacaaaatgtagattcagaagaacatgtatcaaccagcaaagcggttgttgatgcctgggttgaagaatggaatcaggttgacggaagtcctggcgaaccactgtacaaaactatgccactctactgtcacgctgccttgccagcgccggtagtgcctgaaggactggttaaagcggtgcgtttttatgagcaggtaaaaaatgagaatccgccagttgggactggtgcgtggaaagacgctgttgactgggtgctcgaagaggcttgccaggctgtaaatacagacatcaaaggatgaacgatatggcaaccaacaatcgtaaagccaagatgctaatttcccgtgtatacagactttgctaccccagccagtggttgagagttagcaatcgccgtgtggtgttgttctcattttctggaattgccagagagggaatcaaagataagcgcagcgcggcgcaaaaccgctggaaaaacaacttgcgcactaaaggagcctaatatggctattgccgcaagttacaccatgcatctctactgtgattgtcgccagtgtacaaatggtaaatatcagtcgccagacttcggtgagtatatcggtacgtcatgggctggctgtgcaaaagaagcacgtaaagatggatggcgaataagcgccgacaaaacacgtgcttttgcgcccggacataaagttttgaggattaacaaatgacaacatttaccgacgacgacaagaaactaattaaagaaatcagggagcgaatcggcagcctggacgtgcgagacaatattgagcgccgggcttatgaaattgctctggcatcactggaagcagaagcgccaaatttgcctggtggtttcacaattgaagaagcaaaagaattacacgaaaatctggtaaaaagtcacgtaagcaaggctttaagtggcgaaaaaatgaaaaaagaaaatcgtgatgccgatttgcgctggattcatggcgtaatagttcaggccgcgtggtttgtgaaagcatcactagggcagaatgcatagtgcgtacctgcttttctcctggcaacggtggatcttccgcttcctcgtcactcgctcgctatgctcggtcgctggactgcggcgagcggttagctatcaaaaaaaatccccgcacaacgcggggatagttttatttatatgcaagttcatgacgtgccgcctgagccagaaaatggctacgatctttgtatacgccgccactttctctcacatatccatcaatacgacgaatcaatacatcaggcaatgaaatattaatacgttgttgtttgccctcaatttctgacaaatcaacatcaattacaaaccagctatcacagtggttataatttgggttggcggaataagtcaaacacccttcatcatgaatatcatcaacagaatgagcaccgcttattaccatctcttccacgattgctaatatcgcttcacgcgccattgcgggtatttctgcctgagaatcagcagcagaaacacatccaaaatcaaagcaatcaaaaaccggaacggtgataccgtatgctgtatgatcatctttcggtgtttcgacaccaacagaaaagaacatggctacctccaaagtcggcggggattaaatccccgccatttttttgatcgatctgacagtacctagcggcaagtcctttttaggatgaggaacaggaaaagtttttcctgttattggcgaccaccatatctggtgactgcttgccttatgccgtttcaactcgcaaccagcagctatcagttctttcaacaggtcagcagatttcatatgtcctccctaacctgaaaacaattatacacacgcatacacacaaaagcaaattatttcattcgtatgacttatgaaacacactgtaaagacagttcaatctttacagtgtaaatcatttatccagttttatcgctatgcatgtgatacatagaaaatcatatagtgttttactatatgatacctgattgacacttttaactgcacatctcatcatttacatcgtaaagacaaacatagctttacaatgtaaagctatataattaaacactccgtgtccctgataaggaaaaaaaatggctcaaccaaccccagaaaagatactggcaatcatagatgatcatgatcgcgcacaaaaaaaacaacgcaacaaaaacgtcttcatttatttatgtctctgcttggcaattattggagtggtcgcgcattcctttatatcaacgtttcgtcttgatggtgtagccgtccttacaattcttttgggcgtgtcagcaatcgcattttttctacattatgtagaatcagggaaaggccagattcttagcagtgaccgcatattgtccatactcgctcaaaccaaagattaccccacaattcgacgtaaagttgttaatcgcttgctctccggttcaaaactcacgggtaaagatgaagagtacatattcagtgaactgaaaaaggctgaacaaagcaacgaacgtgaaaagagattgcaagcaattaaagagtatacatcgtaatacaacgtaaagcatcacttgtaaatacaacacactacatcgtaataccagaaaacaccaacgccagcgagcaacaaaaaggggcgattaagcccctgcgcgatgattaatgacttctttttccagtgcctagctctggatcaagcctgacgttaaacacacctttaaagggcgcgtcaggctcctttccgtcctccacacaggactgtaaatacaaatcaaccgatgttttaaattcccgttccaggtcagctaatgtttctgcctcaaaagtcaccagatctcgaataaatgccagctttccatgcaggatattattttcaaaatccggctcaactgtacctaaatatcctttatattttaaatgtttcataaaaccccagcctctttcaagaaaagttatcagatagaagggtgaaagaaaataccagggagcagcgaggccacatacccctaagcgcagcgcaaccgccggaaaacgcaccacactgtaaagacaataaaatctttacaacgtaaagctaactatgtaatacaacgcgctacacattgacatcctccacgccctaaaggacgtggattcctacgacgttcaggctgtcgcctgaatcatttcggtgggttcctgcttcaacgagcggcctgactgcaccatctctccacaggcaagaacggcgtgccccgccgctaaaatgttacgagcgccatttacatcggcgttcgctgtatatccacatacctggcatctgaattgactttgtgacaggcgattttctttcgctgtatgaccacagcacgtgcaacgctggcttgtgtacgctggcggaacagcaagcacctgaccgccacgccagagctgcttgtactcaagctggcggcgcatttcataccagccctgatccagtatcgaacggtttaaacctgattttgcccggacattgcgccccggctggctgaccgtacccgctgctgactttgacatgttgctgaccttcaaatcctcaatgactatcattgcgtggtttttgctgacggtcgttgtgactttgtgaaggtagtccctgcggatatttgcgatacgggaatacagtcgctgtattttgcgtttctgcttctgccagttgttgctgaatttgaccttgcggcttaactgtcgctgaagtctcgccagcgtcttctggtttttctgaaaactgtttacaggatcaaaaatagtgccatctgacagcgtggcgagtttagccacgccagcatccagcccgaccattgatactgaagggtgaaccggagttgatacttcactttctgtctgaatactgatgtaccacttaccgcaggactgactgacagtgacatttttcacaacgcccgtgacctgacggctgttccggtagcgcatccagccaagtttcggcagaaaaatacgactgttttcctgatcgagcttaacgccctgcgggtagcggaatgcatcattctgtccccgctttttgaatcggggaaaagccgcccgcttctggaagaaatttttgtaggcccgctcaaggtctttcagtgactgctgcaatggctgtgatggggcatctttaagccattgggtttcagtggcatttttccactcaaccaaccacgaggccatccttgggtaaggaatatatttgttccctgcctcatggttctcattctgaagcgccagagcacgattgaaaacgaaacgacatgcgcctgcgaagcgcctcatttctcgctcctgttgaccaccgggtcttaactggaatttaaatgcctgtagtcgtttcattcgaccattttaaacaaaaaaagccaggtggaaaacctcgccttatatcctcgccctgaaggacggggttttacggcgcactggataagaaagggagagcattacactctccctatatatgactcaaactaaagcattatcccggttatgcgcccaccaaatgatttcgctaataatccatgcttctatcgcgggtgtttttacaggttccccatttacaatgcggtttgcaagctctatcatttcacatactgacatttgagaatctccaaagatgcatctgtcatttggtaacaggctgccccacagcctgttaccaaccccaaattagtatttgctgattactttaccctccttaatcatttttattagttcctgttcagaatattcttttccgtgttccaatgtggaatatatatcgccaatagtccatactccacactttttaatttctgcatttagccaggattcatgcagaataaacaacggttcgcaatcatttcctttttcataaacataaatagattcggtatcatttccagaatcagaagtaccaacgactttttctatatcgaaatgtttttttagaaaagttgtgaaatgcattttcatgctcctgccgctgagcggctttggtggttggggaccatcccctcccgatgtgtttataataggtcagaactgacctattatcaagtatttttccctccattcttcaaaaaaaacaccatcaaatacatatagttatattcatgtgatgcccgacagggcatggaaggggcgaaagaaaataccagggagcagcggggccacatcgccccgaagcgcggcgcagccgctgacgaacataccaggatgcacagggccatcccttcgccctgcaaagccagaacagaccaacaggccatgatcatgctgatttgcgccgcagaatgccgcagttagcgcgagcgacagcgagtttacgccgtcctggtgcattacagcagggcggggcgctgtactgcgcgtgtgagcgtcagcgagctacgggcgcaattgctcattgttcaatgcaactggggctattaagtccagccataaattcagttatggtttttgtagcttattccgtgatttcgtcatacgttaattctattttcatcttaatattccttaattacttccagaatcagaattctttttattccttttacaaagtacataatcagggtgttctccagctaaaagcagaagaaatttaaactctactggtgtaagtgctgtaccgcttgcagttccgacaggttcttctttgcgacgccaggtacgcggactcatgctaaatatttcggcacattctttctgtgtcaggccaattttttgccgcagacgtttaatgttttctggtgtgttttcatttggcattttttccctcactcatttcctgaatcatcatagaaacaatttctttatcattctctcttaatccgtcgctggcaaagtcgatagtgtcgaatgccttctcatgaaaaacaagatcggcaacagttttcaccgttgctttcgtttttcctaaagtcgcagacttagaaaaagtttttactcgcttcaccagatgaaacgtatcaccttctttattcagataatattgtctgtcaccttttcttatcttcatattgagatagtctccccttttaacagtaaaggggcatatagcccctttcttttaactttttccggtaatcaaatcgacatcttcctgataaagctccccaagaaccggaacaacgccttttttataatcacggatattatggcagtctgtaaaaatgacgacataagcctcgcctgttttttcatgtttaaggcaaattgtgcaaagcgtcacgcgcacaacagaaaacacatgaccagttgtagagacgatagcaggaaaagtagattgtttcatgtttaactcctgccgctgagcggctttggcgattgggggccatcccctctcaatgcattaataataggtcacaaatgacctattatcaagtattttctagacgagctttattgaaaaatcattttcaataaattcatctaacatctttaatataccagctttatttacgaaatcatcctccataatttcgatacttgctgatatttcacatgtaaactcaatgctcctgtcaaatcccgcaatcccagctaatgcagacagcatatgataattatcaatatttatattaccaataagaactttcatttatcctcctgatatggggggaatccccccatattaaaaattacaatctggttgcaagtccggtttgttcattaaataaacattcaagctgatcacaataaatattatcaaattttgatatttcttttactgtagctccacggacacgggaaaatgtcaccaggtatgtatcagagaaggttaatttgattttaaccaaattaattcccttcattgcaaaatttgaaggtaaacgaaagcaaagaccagactcaccattttcatcaaaacaggcaaagttctttgcgcctgtcatagcaataaagcggtttccaccaagctgattaagaatttcagtagcaacaaatttggcgtggttttccatttttaagctcctgccgctgagcggctttggtgattggggaccatcccctctcgatgtgtttataataggtcagaactgacctattatcaagtattttttcctcctttctttaaaataaatatcgttaaatacaaatatttacattcatgcaatgcccggcagggcatagaaggggcgaaagaaaataccagggagcagcggggccacatcgccccgaagcgcggcgcagccgctgacgaacataccaggatgcacagggccatcccttcgccctgcaaagccaggacagaccaacaggccatgataatgctgatttgcgccgcagaatgccgcagttagcgcgagcgccagcgagtttacgccgtcctggtgcattgcagcagggcggggcgctgtactgcgcgtgtgagcgtcagcgagctacgggcgcaacattacattgctgcattcgcctggcattctccacgccttgaaggacggagttttactgcgcaccagataaaaaaaggggcgattaagcccctgtattcactattaacaatttaacatggttgcaggggataccccctgcaactattttcttagtagtatgatgtgaactcgtgtttttcttccggtgatcctttatatgctgtttcgaatgactcaatttcaattgctggcgtactgtaataatcacgcactcgccgttttaatggctcaccacagaaatcattgagtaatggggtcttatatccgctcattgaatgagtccgatgaactgaagcgcgaatctcctggacagttacggtttttttgccatgaacagaaataacctgatagaaattaacgttcgtttgctcatatccccaggaagatacaaacacatcgccaacagaaacagtgccgttattaaaagttaatgttttcatttttatctcctgccgctgagcggctttggtggttggggaccatcccctcccgatgtgtttataataggtcagaactgacctattatcaagtatttttccctccattcttcaaaaaaacaccatcaaatacatatagttacattcatgtgatgcccgacagggcatggaaggggcgaaagaaaataccagggagcagcggggccacatcgccccgaagcgcggcgcagccgctgacgaacataccaggatgcacagggccatcccttcaccctgcaaagcccaacggactgacaggccatgatcatgctgatttgcgccgcagaatgccgcagttagcgcgagcgccagcgagtttacgccgtcctggtgcattgcagcagggcggggcgctgtactgcgcgtgtgagcgtcagcgagctacgggcgcaacaacacaccaggcaaaatcgcatcctgaaaagttaccctgtaacatacacacaatgtaaagcgcaaaaaacaattacattgtaaagacacaaacatctttacaacgtaactataatgaatacaatgtaaagacaaataaacctttacactgtatatccgaggtttctatggggagagcattacttgtcgcatcagataaaggcggtgtaggaaaaagcaccacagcaacaaacctggcttcttatctggtaaataattcacgaacggtcatcattctgaagaccgataaaaacaatgatattcttagctggaacgaaaaaagaaagcagaatggcttattaccggttcctgtttatgaagagtatggcgatgtatcagaagtcattaagcgcctgaaaaaaatatgtgaagtgctgatcattgactgtccagggcatgacagcaaggaatttcgcagtgccttaactgtagctgacattctgcttactctcgttaagccgtcttcagatttcgaagcagaaacgctgactcatgtaacagaaaaagttcgcacagctcaacagatcaatccagacctgcaaccctgggtacttttcacgagaattaacacgacaaaaccacgccacagaaaagcagcgattgatctcgacaagttactccgggagaacccggtgtggatacagccacttcgtacacgtatttcagatttagatatttttgaagcggcctgtaatgaaggcgctggcgttcatgatgtacgtcgcgcatccagcctttctacagctaaagcacaaatagagcttttggcgcaagagttaggcatcaatccctaatggatgtaatacgacagctttacatcattagctttacacagtaaagctaatgtaatacacgaaaggtgatataatggctcttgacttgaaaactccggtaataccaggacaaaaaacagaacaaaccaatgcagacacagcccgattcatcaatgaagctacccgcaaaaaatcgggagcaactaaagtgaccaatgtccggcttggggacgtttacgaagatattctggaacgggaagcactgcgaacaggccagacaaaaacagcaataatgaaagcggctcttgcagcttacgaacacggcctggacgaaaacggaaaaaatcactggattctacagtcagccaggctgaaatgataaagcccttcggggctttatcccttacgttttaattgtttcttctcgctggctttcttacgggcatcgagaaccagttgcgcataagttgcgtgtgctttttttactgtaccagcaggtttcccgtaaaggtcgtaacgtgttgcgcctggtacagtacaattctgaagatattgccaccggaacgtcatcacctgaaccgcacaattccactcttcaatcgtcagatccacatccgggttatccgccaggtatttctcaacgtcctggagaatcccgcttttcaggggcaagttctttttttcgtctgtccatagttcaggaaaaacagcacgaactttattgaaacacttttcaaaatattctttcggatattttgggggaaaagtgatttgttttttcaaataccagggctgaggctgctttttatgtgttttctctgctacagcatctttcttctgtactttcttgttttcattaactgctgatttttgtacttcctgcggcttttcattcaccacaggattttctggcatgaccagaacgcggcgttttttgaccacaatcacgggtgttttttttggctgcatactcgcctcaataattgctgtcatattgactaattataccattttcagcagttaatatcctgaaaatacatggaaaagggggtatccgtacagaataccccctttgcaaaggcgcttaatgccagaaccacatcatccccaaaaaggcgggctttcgcccgcctccgggttgctacttaccgttggattcgtaagccagacttgccgtaacctccctgtttccatctttcagccggacctcgcacaaacgattccgggtcagatacgtgaatattaacaatgtgcagcacacgattaataaacaccaggtcagggcgtttttcggctgtttcatggccttcttctccttgcgtaacgcgcggtaagaggctatcctgatgttgttgaagcattgggatcgcctcgtgggtgtactgaccccaaaaagttggacagttaaacacgaggcatataggtctgattccgatattcaattggagtcagaccttttaatttcaggctaattcttctgctgttgtagtattcaatatattccgtaacagcatccttcagttcgcttatattactgaactcatcaagataaaaacactccgactttaaggttccaaagaaacactccaccacagcattatccagacaattgccttttctggacatgctttgtttaataccatgttctttaaggatattttgatatcttctcatacgatactgccatccctggtcagagtgcagaacaggatgctcgtgaggattaagctttttgaatgcctgatcgagcatattctcaaccatgttcatcactggtctttccgaaaggctgtaagaaataacttcgttgttgaagagatctattactggagacaaatacagcttgcgcccattgactgcaaattcagtaacatcggtaacccacttctcgtttggccgcgtagccttgaaatctctttggagaacattaggggcggtttgccctacctctcctctgtaagagcggtatcgcttgaccttaatcgctgctttaagtgagagggttcccatcaggcgctgaacagctttatggttaatctgtttcccttctcgatgaagagacagcgttaccctacggtatccgtatcggcctctattctcgtgataaatctcactaatacgctttttaacgtccgcatacttgtcaggcttgctgagagcctttagatgataataaaacgtactgcgcggtatctccgcagccctgagaagctcatcaagaggataaaactgccttagctcgttgagtactttcactttttcgtgggatgagctaaggctttcagcttttttagatacataagccgcgtttcaagaaatcgaacttgcctttcaagatcctcaatgcgtcggtcttttgacagctccaatgctgatgccgctttttctggatcaactgatattgcaatgtttcttttggtgccaatcttgagcgcgcgtaaaccagcttctccgcgctcttcatagaccttcagccacctggctacagaaccactaccagcaagcataaagtgagcagcagcctgattaagggacatgtgctgctcgatcacagctttcacgaccttaatacgcaactctggatcagcactaacgcctttaggtttgggaattaaacctttttctccatgtttttcatagagggcaacccatgtcctgacctgggttcgggggacaccaaaacgtgccgagatgatcctgtaaccatcatcagttgtgaagtagtgattcacgacttcaaggcgcttttcaaaagggtattttggctttgacatattaggggctattccatttcatcgtccaacaaaatgggtgcagtacatgggttaatgaaaaattaactacggggctttcttctttctgccgcacaacaagcatcagcagcagttccaggcttccggcaaggcgatcaacgacaaggtgcggatgtatgggcgcatcggtcaagcgttgattgaggccaagcaaagcggcagcgatccgttcgccgccatcgaggccgttatgccctgggacaccttcgccgccagcgtcaccgaagcgcaaacattggcgcggcctgccgactttgatttcctgcaccacatcggtgaaagctatgccacgctacgccgctacgcgccgcagttcctgggcgtgctcaaattgcgggctgcgcccgccgccaagggtgtgctcgatgccatcgacatgctgcgcggcatgaacagcgacagcgcgcgcaaggtgcccgccgatgcgccaaccgcattcattaaagactaactaccatggtccatatgaatatcctccgtcggggtttgtaccgtacaccactgagaccgcggtggttgaccagacaaaccacgactcagtcacctcctagctgactcaaatcaatgcgtgtttcataaagaccagtgatggattgatggataagagtggcatctaaaacttcttttgtagacgtatatcgtttacgatcaattgttgtatcaaaatatttaaaagcagcgggagctccaagattcgtcaacgtaaataaatgaataatattttctgcttgttcacgtattggtttgtctctatgtttgttatatgcactaagaactttatctaaattggcatctgctaaaataacacgcttagaaaattcactgatttgctcaataatctcatctaaataatgcttatgctgctccacaaacaattgtttttgttcgttatcttctggactacccttcaacttttcataatgactagctaaatataaaaaattcacatatttgcttggcagagccagctcatttcctttttgtaattctccggcactagccagcatccgtttacgaccgttttctaactcaaaaagactatatttaggtagtttaatgattaagtcttttttaacttccttatatcctttagcttctaaaaagtcaatcggatttttttcaaaggaacttctttccataattgtgatccctagtaactctttaacggattttaacttcttcgatttccctttttccaccttagcaaccactaggactgaataagctaccgttggactatcaaaaccaccatatttttttggatcccagtcttttttacgagcaataagcttgtccgaatttctttttggtaaaattgactccttggagaatccgcctgtctgtacttctgttttcttgacaatattgacttggggcatggacaatactttgcgcactgtggcaaaatctcgccctttatcccagacaatttctccagtttccccattagtttcgattagagggcgtttgcgaatctctccatttgcaagtgtaatttctgttttgaagaagttcatgatattagagtaaaagaaatattttgcggttgctttgcctatttcttgctcagacttagcaatcattttacgaacatcataaactttataatcaccatagacaaactccgattcaagttttggatatttcttaatcaaagcagttccaacgacggcatttagatacgcatcatgggcatgatggtaattgttaatctcacgtactttatagaattggaaatcttttcggaagtcagaaactaatttagattttaaggtaatcactttaacctctcgaataagtttatcattttcatcgtatttagtattcatgcgactatccaaaatttgtgccacatgcttagtgatttggcgagtttcaaccaattggcgtttgataaaaccagctttatcaagttcactcaaacctccacgttcagctttcgttaaattatcaaacttacgttgagtgattaacttggcgtttagaagttgtctccaatagtttttcatctttttgactacttcttcacttggaacgttatccgatttaccacgatttttatcagaacgcgttaagaccttattgtctattgaatcgtctttaaggaaactttgtggaacaatgtgatcgacatcataatcacttaaacgattaatatctaattcttggtccacatacatgtctcttccattttggagataatagagatagagcttttcattttgcaattgagtattttcaacaggatgctctttaagaatctgacttcctaattctttgataccttcttcgattcgtttcatacgctctcgcgaatttttctggcccttttgagttgtctgattttcacgtgccatttcaataacgatattttctggcttatgccgccccattactttgaccaattcatcaacaacttttacagtctgtaaaataccttttttaatagcagggctaccagctaaatttgcaatatgttcatgtaaactatcgccttgtccagacacttgtgctttttgaatgtcttctttaaatgtcaaactatcatcatggatcagctgcataaaattgcgattggcaaaaccatctgatttcaaaaaatctaatattgttttgccagattgcttatccctaataccattaatcaattttcgagacaaacgtccccaaccagtataacggcgacgtttaagctgtttcatcaccttatcatcaaagaggtgagcatatgttttaagtctttcctcaatcatctccctatcttcaaataaggtcaatgttaaaacaatatcctctaagatatcttcattttcttcattatccaaaaaatctttatctttaataatttttagcaaatcatggtaggtacctaatgaagcattaaatctatcttcaactcctgaaatttcaacactatcaaaacattctatttttttgaaataatcttcttttaattgcttaacggttacttttcgatttgttttgaagagtaaatcaacaatggctttcttctgttcacctgaaagaaatgctggttttcgcattccttcagtaacatatttgacctttgtcaattcgttataaaccgtaaaatactcataaagcaaactatgttttggtagtactttttcatttggaagatttttatcaaagtttgtcatgcgttcaataaatgattgagctgaagcacctttatcgacaacttcttcaaaattccatggggtaattgtttcttcagacttccgagtcatccatgcaaaacgactattgccacgcgccaatggaccaacataataaggaattcgaaaagtcaagattttttcaatcttctcacgattgtcttttaaaaatggataaaagtcttcttgtcttctcaaaatagcatgcagctcacccaagtgaatttgatggggaatagagccgttgtcaaaggtccgttgcttgcgcagcaaatcttcacgatttagtttcaccaataattcctcagtaccatccattttttctaaaattggtttgataaatttataaaattcttcttggctagctcccccatcaatataacctgcatatccgttttttgattgatcaaaaaagatttctttatacttttctggaagttgttgtcgaactaaagcttttaaaagagtcaagtcttgatgatgttcatcgtagcgtttaatcattgaagctgataggggagccttagttatttcagtatttactcttaggatatctgaaagtaaaatagcatctgataaattcttagctgccaaaaacaaatcagcatattgatctccaatttgcgccaataaattatctaaatcatcatcgtaagtatcttttgaaagctgtaatttagcatcttctgccaaatcaaaatttgatttaaaattaggggtcaaacccaatgacaaagcaatgagattcccaaataagccatttttcttctcaccggggagctgagcaatgagattttctaatcgtcttgatttactcaatcgtgcagaaagaatcgctttagcatctactccacttgcgttaatagggttttcttcaaataattgattgtaggtttgtaccaactggataaatagtttgtccacatcactattatcaggatttaaatctccctcaatcaaaaaatgaccacgaaacttaatcatatgcgctaaggccaaatagattaagcgcaaatccgctttatcagtagaatctaccaatttttttcgcagatgatagatagttggatatttctcatgataagcaacttcatctactatatttccaaaaataggatgacgttcatgcttcttgtcttcttccaccaaaaaagactcttcaagtcgatgaaagaaactatcatctactttcgccatctcatttgaaaaaatctcctgtagataacaaatacgattcttccgacgtgtataccttctacgagctgtccgtttgagacgagtcgcttccgctgtctctccactgtcaaataaaagagcccctataagattttttttgatactgtggcggtctgtatttcccagaaccttgaactttttagacggaaccttatattcatcagtgatcaccgcccatccgacgctatttgtgccgatatctaagcctattgagtatttcttatccatttttgcctcctaaaataaaaagtttaaattaaatccataatgagtttgatgatttcaataatagttttaatgacctccgaaattagtttaatatgctttaatttttctttttcaaaatatctcttcaaaaaatattacccaatacttaataataaatagattataacacaaaattcttttaaaaagtagtttattttgttatcattctatagtattaagtattgttttatggctgataaaagcgcttttgaagctggggtgggcgaagaactccagcatgagatccccgcgctggaggatcatccagccggcgtcccggaaaacgattccgaagcccaacctttcatagaaggcggcggtggaatcgaaatctcgtgatggcaggttgggcgtcgcttggtcggtcatttcgaaccccagagtcccgctcagaagaactcgtcaagaaggcgatagaaggcgatgcgctgcgaatcgggagcggcgataccgtaaagcacgaggaagcggtcagcccattcgccgccaagctcttcagcaatatcacgggtagccaacgctatgtcctgatagcggtccgccacacccagccggccacagtcgatgaatccagaaaagcggccattttccaccatgatattcggcaagcaggcatcgccatgggtcacgacgagatcctcgccgtcgggcatgcgcgccttgagcctggcgaacagttcggctggcgcgagcccctgatgctcttcgtccagatcatcctgatcgacaagaccggcttccatccgagtacgtgctcgctcgatgcgatgtttcgcttggtggtcgaatgggcaggtagccggatcaagcgtatgcagccgccgcattgcatcagccatgatggatactttctcggcaggagcaaggtgagatgacaggagatcctgccccggcacttcgcccaatagcagccagtcccttcccgcttcagtgacaacgtcgagcacagctgcgcaaggaacgcccgtcgtggccagccacgatagccgcgctgcctcgtcctgcagttcattcagggcaccggacaggtcggtcttgacaaaaagaaccgggcgcccctgcgctgacagccggaacacggcggcatcagagcagccgattgtctgttgtgcccagtcatagccgaatagcctctccacccaagcggccggagaacctgcgtgcaatccatcttgttcaatcatgcgaaacgatcctcatcctgtctcttgatcagatcttgatcccctgcgccatcagatccttggcggcaagaaagccatccagtttactttgcagggcttcccaaccttaccagagggcgccccagctggcaattccggttcgcttgctgtccataaaaccgcccagtctagctatcgccatgtaagcccactgcaagctacctgctttctctttgcgcttgcgttttcccttgtccagatagcccagtagctgacattcatccggggtcagcaccgtcggaaaagtggccatcatttgacgaactacagcccgggttcagcacactgagacttgtaaaaaaaaaccccgcgcggggttttttttttaaaagcaccgactcggtgccactttttcaagttgataacggactagccttattttaacttgctatttctagctctaaaactaacacgccacatcttgcgagaatctattatacagaaaaattttcctgaaagcaaataaattttttatgagacagtcattcatctttctgcccctccaaaagcaaaaacccgccgaagcgggtttttacgtaaatcaggtgaaactgaccgacctgttaccaatgcttaatcagtgcacgaagttcctatactttctagagaataggaacttcggaataggaacttcttttgcggccgcaagatccgctcatctgtaacatcattggcaacgctacctttgccatgtttcagaaacaactctggcgcatcgggcttcccatacaatcgatagattgtcgcacctgattgcccgacattatcgcgagcccatttatacccatataaatcagcatccaggttggaatttaatcgctgcctcgagcaagacgtttcccgttgaatatggctcataacaccccttgtattactgtttatgtaagcagacagttttattgttcatgatgatatatttttatcttgtgcaatgtaacatcagagattttgagacacaacgtggttcccgccatatgaaaatccggccagaccaacatcattctggcgctccgaaagaagggatattcgccgccgtgaccagcctggagcgggtcgcataatctttggccgcttcgtagtcgaggaacatggcatgaaccacggcagcctggcggctgcaaattgaaaaccgccccggttcgtcctgttgttgccgcacgccccgcagaatatgtatgctctgaggacctgttttattaaggactcatccccttatgttgacccgcaaaagtatcgatacagttctgctctctgttggtgctgagaagctctcacaacgagaatgggactggatgaaaatgctcaaacccatggacccaccacctgcgatggtgacgacctccatcctgaagcgccgtggcgatacagcagcccttaccctgctacaggataccggggtttaatccatcctcatgttgtccggttttactccccgccctctgaaacgtctgttcacagccaaccagtgctggacgtccttcctggatgcgggcggtctgcgcgatatcgaggttgaagccgtcaccaaaatgctggcctgcggcacacggatactgggtgtaaaagagttcgggtgtgataacccggactgtcagcacgtaaagtacctgaccaactcatgcggcagccgtgcctgcccgtcctgcggaaagaaggccacagacctgtggacagcaacacagctgaatcgtcttcctgactgcgactgggtacatctggtcttcaccctgccggacacgctgtggccggtgttcgaaagcaaccgctggctgctgaatgacgtgtgccgtctggcggtggagaatctgctgtatgccgcccgaaaacgggggctggaacccggtatcttctgcgccatccacacgtatggccgtcgtctcaactggcatccgcatgtacatgtgtctgtaacctgtggaggtctgaataagcatggtcagtggaaaaagctgagcttcctgaaagacgcgatgcgttcacggtggatgtggaatatgcggcagctgcttctgaaagcgtggtcagaggggatggcaatgccggagtcgttgtcacatatcacgacggaatcacagtggagaagcctggtgctgaaatccggcggaaaatactggcatgtgtacatgtcgaagaagacagccggagggcggaatacggcacgctacctgggtcgttatctgaagaagccaccaatagcggcttcccgactggctcattacaacggaggggcaagcctgagcttccgttacctggaccacaaaacgggagaaacggcgacggaaacgctgacacagcgtgagctggtcgcgaggctgaaacagcacatcccggagaagttttttaagatggtgaggtacttcgggttccttgccaaccgtgtgtgtggagagaagctgccgcaggtgtaccgtgcactggggatggataaaccggaaccagtggcgaaagtgtgctatgcacaaatggtgaaacagttcctgagtcgtgacccgttcgaatgcgtgctgtgtggctgccggatggtataccgccgggccattgcggggctgaatgtatcagggctgaagaaaaacgcgcgggatatcagtctactgaggtatatgccggcctgacacaggctaagtgtgcccgggaatcggtgaaagtataaaaaacagcctgttacggtataaaaatcgaccatacagagagggaaaccaccggagtggtgggaaaagcagaaaggctcacgtggcataaggcgtggacaatggtatcgactggtttttcaatttcctatacgtcaagatacaaaccaccttttcgccatgaggcagaaagcctcaagcgccaacagcattatatattgaccaggaattaaattcccagctttcggcgtggactatacagtgtgtgattcaccacgatgaatcctttgttgatccactgtgtgacctgcgcaggttgaactccggtcagcctggcgaacgatgcctgattcccccgatagaacttgttgatgtattcaatcaaaggcattttttaattctccgaaacaacgcaaaatcatatagtaatttactatatgatttttattccgcaagtgattaactcatcggatttctttgtagttaacgaaacgttaaatttagtttgtgcctggaatggcacgcaagaagcacactagcattatcattttgatcaaaacgctatttccccccgttattggggggctttctttttgatgccgcgccagcggcatgtaaggcggcactctgttgttttatatggcacagagctaaaccgccgaagcccggcgtaagccggtactgattgataggtttcaccttacccatccccatcctgctaagccatacccgctttcagccatgaaatagcttttgtgcgcggtcggagtggtcccgacaagggtttacccgcagtcggggcgtatctccgcgttagcggaccgtcagggccgcttacgagcgtgtatttggtacttccagccagaaggctgacagcgatgagatttcttagttacaacatccattattgaaagcgatgttgttcccgccctttgggcgggggcggcggcgcttttcagtgatgggttgggcactgtggctgagtatttgcagcgtttttttgtaggagggttggaggggctttgtttttcattaggcagaagtccatatgcccgccgcgaagcggtgggaggtacttttatattctgagcggcgcggcgttagccgctgcaagcgaaggcatttttgtgattatccacagttgtttcaaagataaatattttccctgcggcgaagcaacgcaggggattaaagaacaggggttaagaatatattgcgggtttgatgttctatgtttgctgctttctgaagttattcctttgcgggtttttgtggataaccgaaggcgtttttactccgataccctattgcggccatcaaaaaactgtcagagcgggacaaaatgaaaaacggtcgtcaaatatgaggaatttcatgaaatgcaggcaacacgaaaagccccgaaggggctgaagagagtgccgattgtatcaggcagctaaactagtggggtggcgaagctgtcagagccagttcaagctgacgtagatctctggctaccagttgctctaatctttctttagtgcaccagtacgcttcgtccggcggcatacgcttcagaataaaccgcgcaatttcgtttcgctgttcatcatacggcagttttgccaggcgattagcacgtttgcgctccgctgctttcttacgtcgggacttgatggcatcgagagaacgctgcgcataccagcgtttacgagccgagtgaacagagatttcttcgccctcgcggataacgccttctttaatcaattgcagacggatttcactttctgcaaggcgcttacgttgctgctcctgaagtttcaccagatcaactcccagcattttccagccagtttcggtgatccagacgtatttcggcagtcgctggcgggattcacgatcccatatcgtcttttctgacgttcccaacgtgccaaaggaaacctgctctgccagcagacgggaaaggcgcgatactgtgactgcggtttcaggaatcacgtctcccttactgtcttttgggcttatttcttctgccaggcgggagacagacatgccgacagtgtgcaatccacgatcacaaaaactcacaagtacaacccatattgcgtcaagcagccgctgtttctccggtcggaatttatatttgcgaccgacactctgacgtttcagtacataaaatggatgcaacgacatgtgcattctgagtgtgttctgaccagtgaccgggtcttttttaacgagacgattgtaagcgtggcccaactgtccgcccagcgccttatagttgtcgggacggaaccaggctggattctcacactttggcttagtggaatgttcaccccggcgacgttttgttgttccgcctttgttttcctgggggaccaggaatgagctttcaattcccgcttcgtagtcctgccagaaacggatctgctcttccggtgatagttcagaccagtgacgtttgctaatcacagcaagctgcacttagcttgcactgtaagagttgatatttccttctcatggaattaaactccacttcaggtaacaagcatacctgaaataaataagctcaaggctctgccttgatgtcagcccccgctaatcttcgctgcctggaaaacacgagattacgggggttttctttatctgaaatttacgttcttgaacaaaatttcagcacctcgttttctgcatttacaaatcgcggaaaacttgcctgcaaatttagcagcatgggcgcaatcgatcaacgatgttcaagcctggctcgtttcctttttgattcagcacacatctctgacagcttcaaaatcgttttcagaacagctactgaagccccttctttactgacgttccccatacaaaaccttacaaaatcagaaattcagaattttgtatattcaaaaaagtttttttgactgcatacacccactcacacgatcgaataaaccacacaaacagtattatctagatttttagatcgtacatcatttaacaaacagaatattattctgctttttagatgttatctagatcattagatcgctcacgcggcattgacaggttttaaatgtcgcacacacaatactatccagatgattgtaaaaagctcgttcatcgcgttttttgtgctcattgcctggaaaatgagcactctttgacgcccgttagaacgcttgtcatctcatgctctttaacaaccccggacagcggtcattgcctaaagccctggcataaggaggttattattcgtgcatttcaagcaccgctggcatctgtcagcaacgggctacgtaacagagtgacgtgccgcgccatctacacaggtaacgactctttatccgcaaatatcattctgcatacttaaacccccttatttggtgaactcgcgttgagttaatctcactcactctctccctgagcaagtcgtacaggctgcaacgcagaagtacaccagatttgccagtctccactccaggtaagggggtttagctatgcatgatgatgaacaatcagataaagagcctgtagtgagtggctgcaacttttcataattagcttatgacgctgtattccggggatgtttctatttcagacaaacaaccgggagaaaatatggcgcgtaagttaaaaattaatcctgtcattcctgaatgtgtggcagatttgaaaggatatccactctatatcatcgttgcttattggggattaagaaataataaaacgctcacaacaacggatgttagccgtaatttccttattacacagcaacaatcttatgatgtgcttacctacatttaccaggaagcacagaagcagataacagcaactaaacgaacactatttaacgagcacaaaagaagaattagtgcgttcaggattcttgatattgacaaaggcatattgcgcaccccaaaaaaagagattgcatatgccagctacgacaatataccaactgtaacaatgaaaagtacccgttgtgagatccaagatagttttacagaactgcgccgctggatgtgttcaagaaagacaggtgatcgagtggaggtatttttgaatgtctaagtaccaaataaacgcaaccatcaaaaaaccaggtggtggccccgtgaaatggactcattacagcgacttccctatgaccgctgaagaatgcagaaaaaacttctcaaaagaaaaagaagcaggaaagtgtttttctgttgatgttcatatttcagatttcatttgcaaagaaatacatccactgtgatgaatggggagaggattaatcatgattgacgctataattacgccaatagttacatctattccgttactcttattaattttagttgcgctgatattcgttaaatctgccgtcaaaatcgtgccacaaggtaatgcctggacagtggaacgctttggtaaatatacccatacgctttcccccggtcttcacttcctgatcccggttatggaccgcataggtcaacggatcaacatgatggaaaccgtcctggatattcctaaacaggaagttatttcgaaagacaatgcaaacgtaactatcgatgctgtttgttttgtccaggtcattgatgcagcgaaggcagcttatgaagtcgataatcttgcatcagctatttcaaatcttgttatgaccaatatccgaactgtcgttggtggaatgaatctcgacgatatgctttctcaacgtgacagcatcaattctaaactgttaacggttgtcgattatgcgactgacccgtggggaattaaggtcacacgtattgaaattcgggatgttaaaccaccaaaagaactgactgaagcgatgaacgcgcaaatgaaagcggaacgaactaagcgtgcccggattcttgaagcggaaggtatccgccagtcagaaattctgaaggcagaaggggaaaaacagtctcaaatactgaaagcggaaggggaacggcaatcagcatttcttcagtccgaagcacgcgaacgtcaggcagaagcggaagctcgcgcaacaaaactggtgtcggatgcaatcgctgaaggtgatgttcagtctgttaattactttattgcgcagaaatacactgaagcactccaggcaattggcacagcatcaaacagtaaactggtgatgatgccgcttgattcaagtagcctggtgagttcggttgcaggtatcagtgaactgctaaaaaacgtatcacaggatactcccaaagttgatatgaaacaggctcaacaatatttgtcttaaaacagatagcggacggtgacaatattgttttaatcaccgtccttatattcatattcacgaatgagcaaatcattaaaatgaaaacttatgggttcatccttcttattttacatataatccctatgggggcatggttctttcttctttttattacaaacgatgagaacaaagtagaaaaaatacaaaaccacatcgtatcaatatttccattatggctgaactggggaggggtgatgatagcgatggctctactgcccctgttaatatggagttttaatggcatattcttcggcttctttctgctaatttatgcatttggcgtttataactaccttcatcttctttattcaatttctcccttttatcatggagattagccatgttatggtatacactatttcttctgtgtattgcacttgaacttataaccggaacaggatggttactcttaatcagtcttggtgcattatcaagcgccattgtgggcttttttcttccgatatcacaagaagccaatatatgcttctttgcgtcaatcagcatactggcgtcgataattaagttcttctatgacaaaaaacataagaaattagacactctcctggtgaacccagggcattcacgttttaaaggaaaagaatttacgctcagtgacgatattgttaacggcaaggggcaattactcattggtgatacattctggcctgttgagacgttacacaatgaaaactaccttgcgggaacaagagttattgttacagacatgcaaggaataactcttaaagtaatgaccatcgaagacaagagtgaaaacaaggaataaatcatgcatctttcgttgttaattccgcttacaggagcagcgatgaatgcactatgtatttttattatcagacttctggataaggattttattgaagtctacaaaaaaacgctaaaaaaaattactgcattacatattttattgatggtgttaagtgtcacaggaatagtatgaggacaattctatgcgaaacgcaaatgaaggaatttctcttgcagctattgtagctaaagaaacaacaacaggtaaatggaatggtactggtgggggtattggtttaggtactggtggtattggcttattcatcggaggtgtttctggttctaaacaagagcagacacaaagggcaaaaaactttgaatcgcctaaagaggaagaatacagtctattaaatgtatacggttcgataataaaagttctcgttttcggcgtgctatttggtttatctgcccgtttatttacatctttatcaaacactggttctgattttgctgaaccagtaacaaccaccacagccacaggaaagattcaatctattatgggtggcatggcagaaatggtaagcattttaggcaccgttgtcccttttttagtaattatcacagcaatgatctggtttctgtttttcagcagcaaacgagaaaaagaagagttaactcgagttgaacgtgaagctgctaaaacaaaactccgtatagatgtctatcaccgtttacgttacgttgaaagcgatcatgtcgtttttgacccgattacaggccgggaggttccggcagaacggacgtgtattaataaactgattgaggcacttgttgatgaaagcaacgacatctcaaaaagaaattgacgaacttctgaatgcaataaaaacaggacattcaaaattcattctatcaatacccgtacatactacccatccaatggcccataaaataatgaagccttacttcaggagaacaggaccgcttctgtattcagatagtatattcaggatttgaagaaagcatttatttatatagggcatacaaaaatgagtgcttttattaagctggcatctgttctggcgttatttattagcccggttgtggttgcaatagcaggagaacaatctcactgtacaaaaatcaacgaataccctttcatcgtcactcaatgcgacgacggaactgtgacagtggtaaatgtgataaataaccgtgtagctgtgtgccgtaaaggggaatcatgcaaagaaataaa

SEQ ID NO: 165 - DNA, 70839 bp, Artificial Sequence
  plasmid TP114Kill3
attataactctggacacattacatgactcaagcaaaagctaatctgagaaaacttcgccgtgcacgttatgtcccccctcgaacagtaaagaaaagcatagcgaatacagaacgtgtcgtttcaaaagcaattaccggctgtggtgtcttccgtgatataccacaagtaaaaatcaatctcatcgaaacaaggaaaattttacaaatcgaactggctttatccattgctaacttatctgaggcgaatccaattgagatacgaaaaaaaatcaaaagcattgaccgacaattatcttcaacctcaaaaatcagaactacattatgaaaaaaaacgacgatttaatcactttaccacctcataacagccacgctctcgattacatcattaaaaaagcgtttacaccacgtaaaaccaaaacatcgacagcgacccacaacgtttatagttacaataaagaagaatccacattaaatttccaaaaaattggagaagcaatttttttcggcacagacctggtaattaagctgaagccaaatattagtgcctctggtgaactcttcatctgccagaaggactaagctatgaacattgtttcagaatttcttgagaaagtaacaaccattgttgaatccacagcggcgacgaacgccgctaaggtcgcacaggcaatatctcctacattttttgcggctatagccttatacgttatttatctaatatatgaaatcacgtatgcccaacgtgacatccttatgaacgaggtgacgaagaatatcggtgcattcgccctggttggtgcattcacttattcagcgccttattacagccagtttgttattccttttgtaatgcacgctggctccgacctttctgctgctgttactggaggttcaggaactgcaaccagtgttgataatttgtggaacgctctatctacgaatttaaacaacttccttgatacaagtatgagtatttatggaaagttccaaattgctgagaaaatgggggtttatctagtatgggggattggctatatcggcggaatgcttctcatctattacactactgttttcttgacactatcaactttcatggttggaattcttctttccgctggcattttattcatttgtttcgctctattttcatcgaccagaaatatgtttactgcatgggtcggcagttgtctcaactatatactgttaaatttattctatagcatatcatttagtttcttaattagtttcgttgaatcagttgtccctgttaatggagatataaaactatctattgtagtttactttttccttattactattatttccatattccttatagaacaagttggcacactctgttctacattaacaggtggggtaggtataaatggccttacatcagccgctaatggctttggaggtaaggttgcatctggttttatgcgagcatcaggactccgatctttcaccaatggatttgccagcaaaatgccaaatccattctttaatgcaggaagtcgttctgcatcagcattagttcagggattaaaccgtggaagtaaacttaaagcggggtgattaacatgaaagataaagtattatcatttctctttgctggaataattaccgtaacatcaccatcaatctttgcatctggtattccagtagtagacgttacagcgatagctaaaacagttgaagaagggctaaatcgtgccgctgaagcggcaagacagcttgagcaactcaagcaacaatatgaacagaccataagatacgctgaagaacagaagaaaagactcgaaggcttcactgatttcagcaatggctttgatagcgcatccagctatatgaaggattctctatcaacaataacaaatagtgcaaaatcagatcttagctctttgcgatcgcaatatgacttatcaagcaacattgcagagacgcaacaaaaatatgatgcaatcctggctaagatcaaattctatgaaaatttcaacaatgaaatgcaggaaagggctaagagattaaccacgttacagaaggagttcgcgtcagcagatactccgcaaaaaaaagctgacttatctaaccaattgaatacagaaaaattgacaatggagctacaattgaagcaatatgatattgcagagagacagctaatcgcgtctgaaaatgcaagacaagaggctgttagtcgagaaaagtttaaattaatgatgcaataggtgttcgaatgaaaaaattcataagcactttaactatcttgtcatgcttccttttagctgcttgtgaagacaaagtttatgatgtcagttactacactgaacatcttgaacaagcccaagatgttgtcgaaaaatgcagcaaaggggatatgtctggtcaaaactgcgaaaatgcgcgtgaagccattcaaaaagagcaatcgggtaaagcatttaaaaatatgatgcaataatccttcattaaaaacagctcgcaaagcgggctttttttggctgtacgcagtgaccagttgataaatagttctaatgttcgtgctgcattagaacaacgcacaaaaagaagagtacaagaagacagtgcgggatctaatggaacgtttacaatagaatcaccttccctatagcaaggtgattctatttaaaagaatacccgcctcgtgcgggtcttatcttgcttaaagatctatgaaacctccggcttcgggtattaaactataacttgctttggcaaatattgtttcattgacttcatggaatcttattttctccgcctgttcatatgttacagggaagaacacgccccctggctcattaaacatcataaaatcaccttgcattgcgttacaatgacaacaatgattcgcgtaatacttcatttttgctgttttgctatgggatggataatataattttgaatactcattaatccttgagagagcagaggttgaaattatttcaattttcgttaaatcagtccaccatactctactggttaaccaccgataaatcatatttttctttgaatcaaaatactccatacccttaggggaggatgtttcataccattcatctaatatacaatcttcccattcggcaggatcaactccccaaataacgtctctatacttataccaacgaggcaaaaaaacaccaaacacaggagttattttcttacagcgccaacatgactggtaactttccgcaatataaaaacgttgagaaaaaatattgtaatcatgttcgtttaattcttttacccactgaataaaataaattggatttttcccctgtggaacaaaccatttccgttgttcttgatcccattgcgcccctttttgtttggctaactccttttcttcaaaaggtacatttaaataaaaccgcgccataaccaacttaactccagtattctgttctgatgatgcaacaggatagatatcaaaactaaacaaagagtgcaattccgcctttaatggctcattcgtacccgcctcgtgcgggttttcttttgcctgaaatatggaggaactccatgaaatccatcattttatcgatggttgccgccaccgcattactgtcaggctgcgcggatagcaaaacacaaccagtacctgagtcaccgttaaccaaacatgaccatcagatcacgttgaaaattgataccgtgcgaacagacctgccggacagttctcctgtttgtttgaatggtatgaatatatacgaaagtctgagcgagcggcatccaggcttgtttgccaaaaatcagaacgtgattttccgtagtgcattctttgatgacggtcaggcgatatcctccgaaacaatccgcaaaataatgcagagtaccccgtgcgttgaatcacaaacaacatctgccggaagctgggaacctgccacggaactgctcccccgtcaggcaatatccggtgacactacactggctgaaaaagatcggactgctggcttcacaatgcggatagcaccggagattgagcgtggaaatttccacctgctactcacaaccactgacccgatacggaaacagactgtcgagcagaatattttactcaaaccggaccagccccttatcgtgagtggttttactggagttaatgctgatagccaaagtgagaaccggattgtcatcattacgccacacgtgcgttgattcccctgatatttaaattacccgcctcgtgcgggttttcttttgtctgaaatatggaggaacaccatgaaatccatcattttatcgatggttgccgcaagtgctatcgcactctctgcccccgtatatgcgtctgatccgtgtgcttccgttctttgtctgtacggtaaagctatcggtagcggcggcgggagcgaatgcaaaagcgccgaaaaggacttctttaatatcataaaaaagaaaaagggatctattcgctggagcaaaacctttgatgcccgaaaagcgtttcttaatcaatgcacgaccgcagaccctgcggcgatctcaaaaatcatgagtaagttcggacgttcctggggttaaccatgaaaaagctcattattattcccaccacattattgctgaatgcgtgttcccatgcccctgaacccgcacaggcaaaaggaggttggtatgaactgaataccacaattgagcaggtaagagcagacacatactataacggggtgatccttcagcagcccgtgtcacagccaaacagcactgttcaatacagcaatgataattatctcaaaaaggaaaccataaacgtaactcccgcgcctcgtattgcagaaaccgtaaaaccacgttctgagcaatcagcgacagcgccaaaaaaccagggcagcaataatagttttctgaagccgacaacaaacagcataacttcatctggtgagataaaaacagcagccaaaggagcaactaaacagcattctgaacaaccagcactctctcccgcaaagccaatcagtagcaacaaccatcaggcacaaacggcacaaaagactgatcagcagacaaaaccgcgtcctgaacaaccaccgctaatgtcaaaaagcggttttctgaaaaaaaacgctaacaacgctgttccggccaccacgcttacaggcccatcaacacctgaaaagcaaatttactttgttcgccatgatggtaaaggctcgctgcaaaaagcattaaaagaaattgtcccatcggactggacggctgaaatatccccggaggtaacgaaaactttccgtcgcacgatatcctggcagggcaacgatcaatggccttatgtcctggataaaatgcttcgcaactacggtctgacggtaattaagaacaccgaaaaaagacatcttctgattgattttcaacaacagaaagggaaaacatcacaaaaagcacctgtatctcctgacaaaacccctgcatctcctgtcaggacaccagtttcctctgacaagttacctcaaaaaccgctaacgcctgtcaccgttccgcaaaaacagacagaaaaactcacctggaatcttaaaaaaggttcgacgctgcgggatggcctcaccgaatgggcgtcaagttcaccgtgtggtaattcaacctggaatcttgtatgggatactcctgtgaactacagaatagatgctcctcttattttccggggaaactttgaatctgcattaaaagatacgctgatgctttatctttcagcagataaaccgttatacgcattcaggaatattgcacaatgcgtaatcacaattaaagacacacaacaggagtaatcgctatgggttggttcttcagcttgctcctgatattcctgtcaataggcagttactatctgacagataacaataaccaaaccatacagcgaatgaagttgcttcctgcaaaacaggaagcaattgaatttgtccatttcgcaaatgttatcaatgactatctttataaatatccagacaaacgtaattcaggaggaacgttaacatctgagcaaatcggtataacacccgtttatgatattcatcatattatttacggtaagcgagtttatatctggtctgccgatacagaaggtctgatgtctgctttgcagcagcaaacaaaacattcagcaatgttaggaagagtaaaaaataagaagattgtcgataatcaggggaatgatatgggcgttcccgttccttcctccattccagaagaggctattgtactcattaactaaatatcccctgacaaggggattctgaactggagtctgcatatccgacacatcattatgtgggccggatatatcgctacggcgcggacttcagtccagaaaatctttaccggagatacccatgcaggataatgatgatgtcagcgagcttgatattgccactcgtgaagtccttatcttacgatgcaatcttattcagcttgcttctgaatatataaaaataaatcctcttaaaaacacccgaatctacacagatttaattcatcgttcagcagatgttatcaaaaatatcgaacaaggtaacatccagaataaacataattatctgtcacaggatgtaaaacatacgcttgttttatacgacctgtacaaatcagactttgaacaatgtccgggggcaaaatcccttatacctgtcagggaaaaaattgtctcgctgaaagaacttctttccggcgctaatgagctggacagtatcgttcgtcgcccccgcaggaaaaaacgttcttcacgaatttaatatcaggagataaatcccttatgcagttatcagcggctgttctggcagcactgataagtcagtgtgcccctgatgtatcacccgatacgatgaatgccctgattatgactgaatcaggggctaatccatatgtaatagcgaatgtttctgacggaacaagtaagtattttaaagatgaaaaaggagctattgaatatgcagaaaaattaacagcagaaaataaaaggtttagtgcaggtctgacacagatatacagcaaaaatttcccatcactcaatctgactaataaaacagtttttgacccgtgtacaaatataaaagcaggagcggcagtcctgacggacaattatctgagacaaaaggagggtagtagtaatcaaaaaattctccgcgctttatctttgtattattcgggtaacgaatcaacaggatttattaaagaaaagaaatttaacaacacttcttatctggaacgggttattcgtaacgcgaataactatatcgtgccatcaatccgtgaaaaaactgatgaatcagaaataaaacccccgaatgatgaagagaaaacatcaccggactgggatgtttttggagattttagttaatgaaagtcaaatcaactttgcagtattttatcctggcgtttttcctgtcactaactgcctccgttgcctatgcaggtggactcgataccgcaacaaataccatgacagaacttaagacatgggcatttagctttggtggtgtttgtgctttgtgttacctgatctataacgtcatcatggcattcatggagaagaaaagctggtctgatgtaggaatggcgcttgtctattgttccctcgctggcggtgcactttacgccgggaactgggcgctggaactcttcaaataagtaatccatatatacaactgtgccgcatatttaccttatgtgtgaattgcggcttttttcatggtgagttatggacaaagtaaatgaacatgtcagtgagtcattcatgacttataacgggtttaaccgtcctgcgttaattgctggtatacccttaatgttgttattgttcacggcttttttcgctgttctgacaggcttccccgctattttcctttggggtataaaagggataattattcctgtcatatgtgcgctgtttctttttatagtaaaactggcctgtgaaaatgactcaaacgcactaagagtcatccgtttaaaccttatggggcttttgttaaaaatccgccacagagatttaattattggttattcatctgtcaggtaacatatatgcacaaaatcaaattaaaaaacagtgacaatatggatgttgctcgtgaatatcccgattatcgcttccatataacagacagtattatctttacttctgacaggaaaatgctggcttcacttgttgtagcaggcattccatttgagacagagaacgataatgttcttacaaatttatttaacagcgttaaaaacttcctgattgggttaggaaaggaaggcgacctgtatttatggactcatcttatcaagaaaagagcaaccatcaatggagaatggaattttgacaatgattttttaagcaggttttcaaaaaaataccttgctctgttcacatccagcgcattctataaatcaacatggtatctgacatttgggattccctacgatgatgttgataccggaatcgagcgcatgaatgaaatgacacaacaggcgcaaaaagcacttctaccatttaacgcttctttattatccgtttacaatacttatattagtgaggtggcagactatctatcactattgctaaatgcagaacataacatgattcctttatcatccacccccttatcatccagtatttgtgattctgaatggtattttggtgctgatgttcttgaactgcgtaacaacgaatcggatagtaaaaaattcgcaacgaattatattttgaaggatttcccgatagaaacaacccccggacaatgggatttccttctcaaacaaccctatgaatttattcttactcaatcctttatttttgagtcaccaacaaaaaccctgaagaatatcgattcacagttaaacaaactacaatcagctaatgatgcagccaaaatacagcaggaagaactcgaagctggtaaagaagcggtcgcagccggaattacgttgtttggttcactacactgcgcattaacggtattcggtgatacaccagatcaggccagaagcaatggtataaagctctctgctgagtttattacttcgggtaagggattccgcttcagtcgcgcctcactcgcatcaccttttgtttttttcagtcatatgccgctgaataagaggcgtccactggatacccgaagaacaattaccaacctggcctgtctgatgtcttttcacaattattcctccgggaaaaaatcaggcaatcctattggtgatggctccgccataatgcctttaaaaacggattcaggcagcgtttactggttcaatacacattacagcccaccggaaaaaaatgttaccggacaaaaaattgccggacacgcaatgtttcttggcgcaacaggcacagggaaaacaacatttgaagcaacagccagcggctttcttcaacgctttgaccctttaatgtttgttgtggattacaaccgttctaccgaactttttgtccgcgcatacggagggagctatttcacattgcaggaaggtatctataccggctgcaatccgtggcaactggcagaaggcccggaatcgcccgtctggcacagacttctcgcatttctgaaacgctggacacaggttctggcacgagacaaccagggcaacccctgttctgatgaacatggcattgaattaaacgctgccgtggaaagcattatgcgaatgcctgtcgaagaacgccggacagcccttcttctcgatatagtcagtcctgaacttcagacgcgtctcgccaaatggtgcgacaacggcgaatatgcctgggcggtggattccccccggaataccttcaatccactgcatcataaaaaagtgggatttgatacaaccgttgtcctggacacaaaaaacggtattcatcctgcctgtgaacctttactcgcggtcctgtttttctacaaagaaatcatgcaacgcggcggcaatctgatgctctccattattgaagagttctggatgccagcaaactttcccatgacacaaagcatgattaaaagcgcactgaaagcggggcgcatgaaaggtgaaatgatgtggttaacatcacagtccccggaagacgccataaactgcgcaatttttgcggcgctggtacaacaaaccgcaacgaaaattctcctgcccaatcccgatgcaaaatgggaaggatataaagaaattgggcttactgaaaaagagtttgaaaaactcaaagagctgacgaaggagtcaaggaccatgctcatcaagcaatctggctcttctgttttcgccaaaatggatttgtttggattcgatgagtttatccccgtgctttctggctctgaaactggcctgtctatttttgatgagattattgctgaaaaaggagatgtagctcctgatatctggataccagaactcctgaaacgcctgaacggttaatttctctgttttatacagaacggaaaacaatatgaaaatccccctcataattgcctccgcgctattaattagtgcatgttctcacacccccaatcctgtgcagaaaaaagggggatggtttgagttaaacacagcaattgaacagatcaaagcaggtgattattaatggaaaacacaaactattatgaacattcaaaaaaagaagccaccaaaaagaaatttgaagaaaaaaacgaaaaaaaggattatttcaaggccatacgtgactttgagcgcagtgaaattgaaatcataaagaaaaaggcaaaaacatttaccattctcgccattggtgaatttgttgtaatttgcattcttggtttcgcaatagcctcccttgctccattaaaaaccgctgtaccgttccttgtgcgagtggataacagcactggatatactgatattgcccctcaattatctgatgctaaggaaagttatcaggatgttgagactaaatatttcctgtcaaaatatctcattaactatgaagcatacgactggcagaccatccaggaacaggccgatacagtaaaaacaatgtcttcccaaaaggtgttttcagcttatgacaccatgattcgtgctgattcctcaccactgaacattctgaaaaacaactacaaaattaaggtccagattaattcagtaatccttctaaggaaggatatggcgcaggtgcgtttcaaaaaaatggtactggatttatctggtaaacccgcccccggatacagagcaacagagtggatttcgacgatttcttttgactgggataaagatatcaaaacagaaaaagagcgccttgtgaatccgctgggactgcaagttctgagctaccaacctgatccagaggttataaaatgatgcttaaacgcactactgcgatagttcttttgtcgatgctacaagtacctggtgctttagcagctatgtacggcacaccatcggaacgagacgggcgtattcagaccgtagattataacgagcaggatgtatttaatgtgcgcgtaaaagcaggcgcacaaacaacaattaagttcggacaagacgaaacaataaaagatgtcggaattggtgatccagaagcctggtcagtatcggtcagggacaacactctgtttctgcgtccaaaagcagaagaaccggatacaaacgttaccgttcagaccaataagcatatatatcctctttacctgatatcaaccacgaaacaacccacgtatattctgcgttttaattatccgaaaccaccgtcagctaccgtaatgactgaaaagccatttccatgcactgatggtggaataattaatggtcattatcaactcaagggggacaaatcaattttcccttatcaggtatgggataatggcgaatttacatgcatgagatggactaataaacaggaaattccggtcctttatcgtgttgatgccgatggaaatgaacatctggttaacggagacagaaataaaaacacaatggtttactatgacgtggctgaaaatctccgtttgcgcctgggtgatcaggttgcagatatcagaacatcatcaatcgttaatcgtccgtggaataaaaaaggtacgtcaaacggaaaaacacgagtagagaagttcagctatgaaaaataaagatgatgaaaaaaataatgacgcgggaaatcgcggaattatcgaagtaaaaggtaaagcagcaccaaaaaaaatattaatcctcatcatattactgattgccgcgttatttgtgatcattatcttgtttaaagttctgtcacgagaacaggtcgttcagcaaacacctcttgagaagtctgacgagacactggtcacaaataccaacaatggcgtttcactgacaacaatgatgaaaaacatcgaagaaaaggaaaaactcgatgccgctaaccgcaggaaagcacaggaggagcaagaacagaaacaggcagacaatgccccgtcagcgccagcatcacaaaaggccgatcaaacagccgtcaatgtgatagccaacggcactccccaaaccgccagtggagatccaaaccaaccacaaccattgccaaaatccgtccgacaactgatgggcgacacaatggtgaagatcgacaatcaggaaccaggcgaaaaaaaccaggaaagagatgatttacagggcagtcagtacgcagacggaaaggtatcccctgtgctgaaccgccgatatctgttatctgcgggaacagcattatcctgtgtgctcaaaacgaaaatcgtaacctcttatcccggtatcacaatgtgtcagttaacacgagacgtctggtcggataacggcgaagtgcttcttgcccgtaaaggagcattactgatcggggagcagaataaagtcatgacacagggagtagcccgtgtgttcgttaactggacaacgctcaaagatgaaaatgtcaatgtgcgcattggcgcacttggcactgacagtctgggtgcttccggccttcctgcatgggtcgataatcattttggtcagcgttttggtggtgcattgctgctgtcattacttggtgatggtttagatattctgaaaaacagcacgcaacaaacaggctcaaacagcaatatcacctacgaaaacacatctgacgcaacaaaagaaatggcaaaaacaacgctggacaatacgataaatattccccccacggcatatattaatcaggggactgtattgtctgttattgttccgcgaaatatcgacttttcatccgtatatgaacttcagtaattcagtaaagcaattgatatgaataacatcagagataccagtaatacatcacaaccacgagataacagtaaaaccgcaagacgatatctggatatgacgggtatccagtctgttcttaatattgaacatgtcacagaaatatctgtgaataaaccaggaacaatatggtttgaaggaaaaaatggctgggaatctaaagatgcgccagacgcgacttttgataatttaatgacacttgccaaaactctgacgaacttatcaaagataaaaataccacttagccatgataatcccattgcatcggtagttcttcccggtggggaacgtggacaaatcatcattccacctgcaacagaaaataacagcgttgtgatatctatccgtaagccatcattaacgcgctttactatagatgattatgtccgaacagggcgttttgataatgtcaggattgcgacgaaacacgaagccatcctgactgaacggcaacgctacctgtatgaattatcccggcgtccagatggtcaatctaaagctcaatttttaagagaggcagttaaagaccgtcttaattttttaatcgtcggtgggactggctccggtaagacaactatagcaaaggcaattgcagatatctttccacctgaacggcgttatataaccgttgaagatgtaccggaaatgtctctgccgctgcatccaaaccatatccggcttttctacaaaaaaaataccgttgaagcgaaggaaatcattgaagcgtgtatgcgattaaagccagatcacatctttcttgctgaacttaggggtaacgaagcatggagttatctggaggcgcttaatacagggcatgaaggctcaatcagtaccattcatgctaataatacttatgcctcattttcacgactggcaagtattgtaaaacaatctgatgttggtatgactgttgatatggacctcatcatgcgcacgataaaaacatcaattgatgtcattctttttttcaaccataccagaatgactgaactgtattacgaacccgaagaaaaaaatcgctttttgagcacaatgtaaattctggagataactatggatgcaaaaaagacggggggattaattctcttcctgttactgcttcttgtgggtgtgcttatagcctcaaactatctcggtggatacacagcattaagatattcatccgttgatatgtctttgctcaagtgggatacattccattctgtaatctcaacattttctggcaacccacaatataaaaaactcgtttttatggcatggtttggattcagcgttccattaatattctttgccatattcatgttaattgtcgtgattgggattatgcctaaaaaagtcatctacggtgacgcccggctcgcaactgatatggacctaagtaaatcaggttttttcccggataaaaaatcaccttacaaacatccaccaatactcatcggtaaaatgttcaaggggagatacaaaaaacaatttatttatttcgccggacaacaatttttaattctttatgccccgacacgttctggtaaaggggtggggattgttatccccaactgcgtaaactatccaggaagtatggtcatactggatatcaaacttgaaaactggtttttatcagccggattcaggcaaaaagaattagggcaagaatgctttctctttgcgccagccggatacgcggaaactatcgaccaggccattaaaggacagatacgctctcaccgctggaatcctcttgattgcgtcagtcgcagtgatttacttcgtgaaacggacctggcaaaaattgctgcaatccttatcccggcaagtgatgatcctatatggtctgattctgcacgaaacctttttgtcgggttaggactttacctgctggacaaggagcgttttcacctggaacagaaagccaaaggtcataatgtaccggacgttcttgtttccatcagcgccatactgaaaacgtcggttcccgatggcggcaaggatctcgccgcatggatgggacaggaaattgaaaaccgtagctggattagcgataaaacaaaatcattcttctttaagttcatgtcagcaccagatcgcacaaggggaagtatagaaacaaacttttcatcaccgctgagcatcttcagcaaccctattactgctgaggcgacgaatttcagtgattttgatatccgggatattcgtaaaaagcccatgtcaatttatcttggtctgacaccggatgctttaatcactcatgagaaaattgtaaaccttttcttctcattactggttaatgaaaactgtcgtgaactgccggaacacaacccggacctgaaataccagtgtcttattctcctggatgaatttacatcaatgggtaaatcggaggtcattgaacgcgctgttggttttacagcaggttataaccttcgctttatgttcattcttcagaatgaaggacaagggcaaaaaagcgatatgtacggtcaggaaggatggaccacattcactgaaaacagtgctgttgtgctttactatccgccgaaatcaaaaaatgctctggctaaaaagatttcagaagagattggggtgcgtgatatgaaaatatccaaacgctcaatatccagtggtggtggtaagggaggaagttcacgtacacggaatgatgatgtaatagagcgcccggttcttcttcctgaagaaattgtgtctctccgggataagaagaataaagccagaaatattgcaatccgtgaaattataaccagtgaatttagccgaccatttattgccaacaaaataatctggtttgaagaaccagagtttaaacgccgcgtggatatcgcccgtaacaatcatgttgacattccaaacctgtttacacaagaagtcatggatgaaatagcaaaaattgcagaaatttatctccctaaagctggaggaaaaaaagtcatggttgccggaggcaatgtgattactaatccagaccttgataatcacgataaaacagacgtatctgaataatcctcgcaaccagcaaatagtattttgcatattccataaggtaattaaacatgaataaaaaattgctttgtttattaatatcctcttttttattatcaggctgtgcaaacttcaaaaaaatcaatgctaatgaacttgctgccgaaagagacgcacaaaaagcgactgaatacgcgaaaaaaattcgtaataacccggttatccaggattcaacaaaacaatggattaatacaacgccaattattgaaaagcaggtaaagcaatcagcgccgccctgcccgattgtgattaatactcgttcagatattgagctacgccagatcgcacaacgcatcacacaaacctgtcatatcccggtacgaatcagcgccgatgtctggacctatctgaacggtacaggcactggctcaacacaacaaatgacaggctcaattccagcacctgatgcaaatggaatggttcctctggcgtcagtaggcagtcagccagtaaaagtctcttctggcggtacatcactccctgaactgaatatctccgggcttcctgccctactgcaaaccgtatcttcacggctgggaatatcctggaaatacgataaaggtcgtatcacattcttctatctggaaacgcgctcattcccgattacatatatggacagcaatgtggcatacaactcaaaagttgtgagcggcacaatgtcttccagtggcagtaccggctctacaagttctggcggtatgactggcgacgcatcaaatacgcaaactacaaccgtggaaatgaaatcatcgctgtacaacgacctgaaaagcgaagtttcctcaatgctgacaccaggtacagggcgcatgtatctgtccacaggttcactgacagtaacagataccccggatgtactggacagcgttcaggagattgtgaacaagcgcaataatgaaatgagtcgtcaggttgtgctgaacgttgaaatcctgagtatcaagaaatcaagccaggaacaggcgggaatcgactggaacgcagtatttaatgatggtcatcttggtctgagtcttggtggctcatttggtgatgccgccgagaatgttattaccagtggtgtatccatcgtggacggtaagctggctggctcaaaagcatttctgaaagccctgtcgtcacaaggcagcgtcagtgtcgtaacgcaaaactccgctgtgactaaaaacctgacgcctgtccctatgcaaattgccaatcagcagggcttcattgaaagtgtcacaaccgattctaccgccaatgtgggatcatccacgtcactgaatgcggcaacaataacaaccggattcaatatgactctgcttccatacattcagccggattcacaaaacctgcaattgctgttctcaatgagtctgtctgacaaacctacttttgaggtgttcgaaagtggcggcagtaaagcacaaacaccgaatgtggatttgaaaacaattaatcagactattgatctgaaatcaggccagacagtcattctgagtggattccagcaatcaaaccggaaaaccagtaagcaaggtgtaataaccccctccttctttggacttgggggtggcgttaacagcgaagacggcgacacgattctggtcgttttgattacaccaaatgtgcttaattccggctccagtgcagtaataaaaaatgtgaactaattaactgaaaactccctgaaaaaacacagggagtttttttggaggtcactttgtctgagaataatcagaataaccagaatttcacttcggttattaaaaacaagcgtgcttttttctccggtctggactggaaaacgcttccttcagaagaaaagaatgcgcgtacattcgcaagaaaaaacgacgctgaatattttctctcctgtcagtatcaggattcagaaaatgaaaccaaaacgatggtggcatttatcagaaaagaggatcttcccacaggggcgtcctcattctggtcactggcactgatgataaaacccctcatcgaacctgacggatacgctatctgcgaactcggtgatctttatggctttgtttcctgcgtcaataacgttctcgtcaacgatgttgtaggtaacaaaagtcagatcatgagtgctctgacaacatttcttgagtttaatgaaacaccagaacccggctggaaactataccagcctgaatcatgggatatcagccaggcactcccctcactcactctgtctgcgttgattgacgtaaaaaaaccgccgaaagaggcggcgtttactcgcgtatcccgaaaacgtcagttcatgatttatggcggaagtgccattctggccatactgctctggaacgggatcaccatgtaccaggaataccgggaaaaagaagctgcggcagaagctgcacgtcttcgtctggcaaaagaaatggcagacaaacaggcaatacagattgccccaccgtggcaacatttacctgaaataaaaccatttattgataaatgcattgataaatgggatgcactgcccttatcgatcgccggatggcgttttgaccttgctgaatgcagcacatccggtaatgacgggctgttacgcacatcatataaggaactgagcggcgttacggtcgaggacttcagcacacggatacgagaaatattccaggggacaaccacagcaacttttgtattgccagaaggcagcgccgggggattttctcttcctgtcagttttgacgtttcgcctgatccaattaccccggacacattgccacaggcaacagatattcaggaacgcctgacaacatttgcacaaaaaatgaggttaaaactcacctggcaggaaattgaaaacacaaaaacagatgaagaaggccgtccaataattctcccgtggaacgagtatgaattaatgattcagaccagcaccccgccttcaatacttttcgctaactttcatgaacctgccgttcgcttccagtatgcaggaataaaactggaagaaggaagactgaattatgagattaaaggtgcattctatgttaaaaataattaaaccaacgattatttctgtctgttttttcagttcacttgcttacgcaacagaatctgaaagcacaccaaaagacgaaataaaatattcatctccgaccattttacaggtagagcagattcaggctgaaacggtaatttacgaagcaaagctggcgcgtcagaaggctgtcagtgaattgcgtaatcttgatttgaatggtgtagcgtccgcaacgccagcaataacgccctcttccgggtattcttctcttgcagataccgatataccagcgcaacgtgtagccgctaaatcacttcgtgttattgaaatatttggtacaccacaacaaatgtcagcacgaatttctctcctggacgggtcagtaactgatgtcaaggtcgggcaaagtattcctggtacttcttataaggtggcatcaatcactggtaatggcgtctggattcagaatggtacagagaaacgccagcttattctttaatgctattgaaagagacgacacataatgtttttttctgacgcagactatcccggaaaagatatttctgatgttgtatacgtcagtatatctgaaaaagacgataaacctgttcaggtttatatcgctgataacagtaaaggacagcgtgctgttcaggcttatattggcactctgaatgttaaatatcccggacaggtaaatataacctcgacaactcttgatgttatcgcatcccgctaccaggacagcgaaaaaaggtctgattcaaactcatcacaacacttaaacagcaaccaggaaaaggtcattagctacctggcgaaagcaaacaaactgggaagttccgatttgcacatcacacctggtcgggacggctccgagttcacttatgtcgaagcacgcgtgcatggggaactggaaattctggatgtcatcccgcgtaaagaagggctggaattgctgggtgctgcctattctggaatgagtgatgttatcaaaggtacgcagtttgaccctgcaataccacaggatgcacgtatcgcagagaattttctgaagcctgtaaatctttttggggcgcgctattcgcattatccgtgcgtgggtggtgtgtacgcggtcttccgcctgattaaagatgacagcgaggatattcccactttcgaagaacttggctacatgccgcaacaaatccagacaatcaggcgaatgttacaacgcccggaaggaattatcgttttatccggccctacagggtccggtaagtcaacgactctgagaacggcttcagaagcctatctgagcacgtttggtttcaaccataacgataatatgcgtctcccccgaaaacgccttttcaccattgaatcaccgccggagggccgcattcccggcgcaatacagacggcagtcagggattccgtcgatggctgggttgacgcgattaaatccgctatgcgacttgatccagacgcgatactgaacggcgaaattcgtgatcacgcatcggcattagcagcaatcaaagcctcgatgacaggccaccttctgttgacgaccttacacgccaacgatgccctgaatattattgagcgccttgaaatggagaatattcaggccaggctgattgcagatcctcttctgtttatcggtctgctgagtcaacggctggtacaaaaactctgtccttactgtaagcgcacttatgctgaaatggcagacaaactgagtacagaagaacggaaactcattgaggaaaattgcctgccggaacaggtccggttgcgcaatcttgacggttgcgagcactgttataaaggcgtaacgggaaggacggttatagcagaagtcgtctcacccgacgcacgtttttttcagttatatcgtcagtccgggcgtctggaagcaaaatcatactggcactatgaacttggaggaattacccgtaatcagcacttattacacctgattaatcatggcctggtagatccgctgtccgcacacttcatatcccccattgacgaagataaatactcaatgctcccggaggggacatggcgataaaagatatatttgagaaactcaattcgatagaaattgatttctctggaatatcccactggctggcaaaatacacattcaggtattccagaataagtttatatgaagatttatctggaatgttaaatgatggcataaatgtaaagcgtgctcttacacacctgattgatgtagaaacagactacgggaagaaaacggggtcttctgcaacctactatatttgttgtgagtgccttaatgcactgaataacacaggggctatatcttcagcattaaaaaaatatataaaggaggatgaatatcaattaatatccagcggtgaaattcgcggcgaccttgccggaggattagttcaggccataaaaattgtcagaagtcgttctgaaatgacaatgactcttgttatgtcgatgatttatccatccgtactggtttttggttgtctggcaaacatgtatatggtccacgataccataacacctgttttcctttctctcgcaccgaaagaacgctggacaagttctatgcgattactgacagatacgtctggtttcctgatagaaaacggaacgtatattctctgcttctgcatcgtactgtttttcctgatcagatattcgcttgcgcgttatacaggaccgggccgtcagtatcttgattacattcccccctggtcactttataaaacatttaatggtgtaagttttctcttcaacatggcctccatgttaagtattgatattcccgttgcaaaagcactggaaaggctggagaaaaacagcactcaaaacagatggctactcgaacgaataaaagaaatcaggagatatgttttacttggacagtcacttgcaatggcaatgaaaagttgcggttatgacttcccatcgaaattatgcattaacaaactattacttcattctgaaaatgctgacaatgcattgatgatgtctaactatgctgataaatggctggaggaagcaaaaggaaaagtcaaatcaacaggagtctggataactgtagtatccgcattaattgttttcgcatttattgtaatgatgattactgctctctacgatgtcagtaacgtcctgcaacactaatccctaatatttttaacctctcaataaataaggaattatttattatgtcttctattaatattttaaatatgcgttctgttttttcttctctttctgcacgccgtaaaaaagaacaggacaaaggggcaacactgatggaagtgttattggttgttggtgttattgttgtacttgcagcaagtgcatataaactctattcaatggtgcaatccaacattcaatcatccaatgaacaaaacaatgtcctgacagtgattgccaacatgaaatcactgaaattccaggggcgttatactgacagtaactatattaagactctctacgcgcaaggattactgccatccgatatgatcgcagatacaactggcgcaagcgcgaaaaacccgtggggcggctccgttacaatcacaacctcttcggataaatactccttcaatgttgttgaggccagcgtaccgaagaaaaactgcatggcaatggtaaacgccctgcgttcttccagcgcaatctccaagattaacaacacttccacatcaactgtcgatgcggcaactgtttgctcatctgacagcaatacgctgaccttcagcactgattcctgatttttcatgtgcatcggataagcgccttcgggcgcttattttttccatgtttacaggaggagtattgtgcgttctgttctttatatcctgctatcatgtatttcatcattaatcttttcattgcaacccgcatattcagcgacaacgacccaatttgatgcctgctttgcacaagccgggcaacgttatctgattgatcccctgcttctgaaaagcattgccactgtagaaagttcactcataccagaccggataaatcacaacaaagaaaaaggaaaaatattaagcaccgattacggactgatgcaaattaattcatcacacatccccaacctgaaaaaacttggcgtaataaaagacaaatcagagcttattgataacccctgtctcaatatacaaattggcgcgtggattctggcaacacattttcagaaatgtggcataaactggagttgtcttggcagttataacgctggtttcaaagaaagtaacgaacagaaaagaatcaaatacgcacgctatgtctacaataaatacatggtaaggtaacttatgctaaacagcatatttaatacggcgatactttgctgtgcaaatatcgtctgtcaatgctacgcctacaatgaagtaaaattccgtttaaataaacttaatgtatcttataaaaccggcacagagaaatattactgtctgatactgacaacgcttgccgttctgtatctttcattaaaccagctatcactgattcaatctataatagtgattgttttctatgctttccttacattaatggcttgtatagaccttctttcatttctactaccacgcctttataccgtgacatttatcttctctggcctgttatatcagacatggaataacaatatattgtctggtttgttttgtgcaatgctgatgttcttcattatgctgtttgtaagactttactttgcatataaaaacggaacggaaagtttcggcatgggagatgtgctacttattgcaggaactggcgtatggtttccaacgcctgagattgcctgttcaattgtatttattgccgttatcggcggaattattttcttcactcttggcggattaaacaagcaaaaaaaatatatcccattcggtccgttcctttgtggcggaatgtttgtttactcactcgtaccgggaatattattctgaggattaagagcaatgaaaaagacagataaaggtgtatctcttcttgaggtattacttgtcatcggcataatggtgatggttatccctaaagtttatgaaaacattgaaaaccatctgaataatgttcgctggcagaatgcagcagaacacgcaaatacctataacaccgctgttcgtaattatgttgctgacaatgcatcaacactacttgctggctctttacccaaaacaatcacgccagcaacactcattcagaaaggctatctgaaatctggtttttctgaatccaattttggacaaagctacattaccggtattgcaaagaacagcaaaacatcccgtctggaagccctgacctgtagtaatggcggtcagtccctgtcagaagccggaatgcgctcggtagcaagcatgattgaagggcttggcggctacatcaacagcagcaagcaggcgattggcgcgggtggcggctggtctgacacgccttcaaattacgggctgaactgcgcgaccgggcatattgcaatggcacttgttggcgctgatttgcaggaaagcgaccgtttgtatcgttactccataaccaatcgtcccgaccttaacaggatgcatacggcgattgatatgaacagcaacaatctgaacaacgtcggcactttaaacggcaacgccgccgcgctctccggcgatatcagcgcacgtaacggtacgttctctggcgcaatttcaggaaatacagccacaaccaacggcgatatcacttcgaataatggctggctggtcacaaaaaacagcaaaggctggatgaacagtacctatggtggcggctggtatatgtccgattcgtcctggttgcgcagcgtgaataataaagggatttatactggcggccaggtaaaaggtggaactgtacgcgctgatggacgcctctatacaggcgagtatttacagcttgaaaaaacagcaacggctggcgcttcctgctcccctaacgggcttgtaggccgcgacagtacaggggcgatactttcgtgccaatccggtcggtggtctggtggcaataaagtgaactactccgcctgtaagtggtatcaatcatctgtagcaatgaatcacttcattggcgggaaaagtggaggatctatctactacaaacccattcaatgcccgaccggatttatcatgacaggtacacgcatgtatggcattggtgatggcgttgatgaggaacacgttgatgcttattgttgccccttcggttaaatcccagcaccaggaagattcaggcatgtaacagtaattgtgccgccggactcataatttccccacgcataattattcacataccaaaccttgttttggtcggagtatacctgctgaaacccaccaaaaggcgcaccattaaggtatgtccacgaacagtacgcatgtacgccaatgctcagatttcgggtgtttttcccgatattgtacgtactggtagtgaagttcacttttgccgttgtccagataccggattggcactggcccccgtgccaatccggtacgtggagaagggcatcaggtagcactgttctgacaggaaaaatagcaaatggacaacagatcccattgccatctggtttttctgccagccagtgtacctggagtgtcagtaatgcagaaaatccgcacgggtggaagccgaattattttgcggggtcagttgcaacctatgatgccaatcgaattgtgaaatgcggcttctatgacgaatacaacttttatggcggtactcaccgaactgacctgtcggggaaatgtagttacatcgtggtttgccagtgataagtatcgtcactggcaaatggcgtaaactgtaattgaaccattttgatcttcggtcgtgtcgcaactggcagtccatgcattgttgcctgaaggcatggaacgcgtgagccatataaatccggtatttgatctgcattgaccgcctccaccaatgactttcttgccagatggacatgttgccgttgctccaggccaacgccacgcagtagctgaagcggtaacaatttggctatcacctgcgccaatttttttccacgtaccggattggcacggaggccagtgccaatccggtgtgtggagggcattaggtggaaagctcaaggttactcaactttccagcactggttacttggggcaatttgacttttgtgccattgccagaatgggaaatgctgaggattctcattactgccaggtagtcgagagtccatctggttcacgaaaatggtacaaatacgagcacaagacaggttgtattgcgtcctgtgtaactctcaattaagtttggtatccaaaaactgaaaatacccctgagccacaagagtagttttgggccggataagaggtgatctgataagttgcgccagcagggacagcaaaagagatgaatgctgtcttcccataagatgggttgttgctcgcatttgtgctaatcaatacccctgcaacgtatccctgcaatctggatgtgttagcgcaatctcccccggcggaaccaccattccctccagaggcgtaaacaaacagcgtaccacttcctgtattgcgaccagtaaatgatcctctgtgtgagccaagattactgtaactaccgttagaggaaccggaagttctccacacaccggattggcacggtgatattgcatttcgaagcaagaatctctaccttccccccttttttgtctggaggggatatgtttcagaaaatcaaaattcgcaaaatgacaatcagccgggcgctggacaaatacctgaagacagtatccatccacaaaaaaggccatctacaggagttttatcgcgtaaatgtgattaaacgtcaccctattgctgaacgctatatggatgacattaccactgttgatattgccaattatcgggatcaacggttggcgcaaattaacccacgaacggggcgtcaaataaccggaaacaccgtccgtcttgaacttgccctgttgtcatcattattcaatatcgcccgtgtggaatggggaacatgccgcatgaatcctgtcgaactggtcagaaaacccaaaatcagtagcgggcgcgatcgtcgcctgacttcaggagaagaacgccgactttcgcggtatttcaaagaaaaaaatcaggctctttacgtcatttttcatctggcgctggaaacagcaatgcgacaaggtgaaatcttgtcattgcgttgggaacacgtcgatctgcaacatggggtagctcatcttccaacaaccaaaaacggtgctccacgcgatgttccgctatccaggaaagcccgtaattacctgcaaatgctgccgacacagcttaacggtaatattttttcttatacctcttcgggattcaaaagtgcctggcgaacagcacttcaggaactgaagatagaaaacttgcattttcatgacctccgtcatgaggctatcagccgatttttcgaacttggtacattgaacgtcattgaggttgccgctatttcaggccatcgctccctgaacatgttgaaacgatacacacaccttcgggcttatcaacttgtcagtaaactcgatgcccgacgcaagcaaaccagcaaaatcgctccctattttgttccctacccggcaacggtcgagaacagaaacgggcaagtcgttgtgactctgagtgatttcgacctggaaacaagcgcagccacaaaagaacaggccatatttcatgccagcgtgttgctgctacgaacactggcacaagccgcccagcgaggagaacgcgtccctactcctggcgaacttcctacaaacattgatgaacgggtaatgatttgtccattaacaaattagaggattcacttatgatagaacaactacagagtgattttttattctggatatttatttacttcctgatagtaggtttgcttatcagaaacattcatcttaccagaaaaattaaatccatcgaaaaaaacaaaatgttcccagcggaggaatatgctgtcctggacattgaacagcatatgtccaataaatatattgggcggctagtaacccgttttatgaagagaactaatggtgcacctttgttaattgtgtttccagaatacgataaaggagacaacaatgaagacaaaaattctccaccattccaacttgtaaaactaacatccaacatcaacaatattaaagaaatttattccaatgatgacttaaactgttttctgaataatatttcggcacaaaaaaatttatatacaacgcactctggacctagccaggcatggattgaacatgcatatcctttgcaacaagtaactattctcttacaaggcactcgtcatagtgaaagggaagatataatcagtcaacttgagattattctttccagactaaaaaatggagaaaatacaggttttgagcatgacgatgattttggatattcatttcagtatgatgccgcagcagtaggaaaatcatcatttttcgatgaagcggcaggaagaaaataagaataacgctctatccattgcacagacaaattaacgttaatcttttatgaaaatcttattaacaatatttatttatctgcttaccgcttttcagtctgcaaatgcaggtggaataccttatacatttaaccagaaaattcttcaggggaaagttattcgcgttctcgatggcgacaccatagaaattaaaacactacccgcaaaaattgttgtgtatgaagttccgatccgagtccgattgataaacatcgatgcccctgaaaagaaacaaccttttggacgctggtcaactagtcagcttaaaactctggttgcaggtaaacaggtgacagtctcttattcacataaagaccgctacggacgcattatcggtcatgtgttcacgacgaacggcacggatgccagccgctttatggttcagtctggcgctgcatgggtatatgaacgttacaacgtggatgagtcattaccggctctgcaacgggaagcgcaggaacaaaaacgtggtttgtgggccgatgcaaatccggttccaccgtgggaatggcgtatcagaaattaagggggcaagaaaatgcattcttcttttggtttgccatgattctgtctttttatctttgtgcaatattaaaggcttctttttaacagggggcggcatgtatgtaattaatcaacagacaagggacaataatattcttacgttgcatgatgtttttaaaatctatcaaaatacaggggggcttcgtcttgtaaaaacagaggagaatgaaaagtacatctccattatcatttgtggcgtttttcgtattagaaaaaacaaaaagaataacaaaatcactttgtggggatacaagctaagagataagcacactggggtatggaccagaagaaattcatttcctggtaagatttttttattctggtctaaaaaatctgcatacgacatggacgactggttaaaatatgcgattagctacatcatcaaatcattgattgaggctggatattcaattgaagacaaactctatttgttacgcattggagaggaagaggaaaacagcgagagtcgttatatttccacactatatccatccaatgtatattactcatatgagtatggaatacatgacattgttcattgccttggtaaaatagcatcattcaactacccctataatacacgatatatcagcagacatattttactcgcagagataaaaaacaaaatttatcagagagcattaaaaattataggggtggataatgaatttaatgcttcaaaagcattgagtaaagctatatggataatggtagataaaaagatatttgcacaatatgccagagcttcacattgttcgatagcttacaattcaattcgtcaggcattatttgaggactatctggatttttcaaagcgaatccatattgtgaatgatatggattttttcggattgtggcctatggttggtcgtctaagacaacaacataaaaatggtcagtttatactatctggaaagacaaaagagttatatgaaaaaatcagttttccctgcaaacttagttatggtgagttcagaagtttacgacatgttagtttgtcattagtatatgctttaaatgataaacatgataatgcatcattcagatttacagtcagattattacgccatccacttatcaagaactatcctgtgagagcaatttactggattatcgattatattagcattcgagcttactcagaaaaagaaaatgatatttatcgtatatgctcaaaatggctagaatatcatcgtgatttatttaaaaacattggcttttatgaccgtaatactgaatccaggcaaacatcacgctgggaaatggaaacgaatcagttgtgtcatgcaattgactggttgttagcagaagaacggttaattcataaaaaccaggagtggccttctttctggagactatctgatgaatggacgcgacaagtgaagaataacgttattcccgtaatcccaaaatggaaaggaactgggataaactggcagaaagttgataacggtgtaaatgaattaattacatttgatgctctgtgtcaggaaggtcaggagatggaacattgcgttgccagttatgcagactggtgtgcatctggagaatatattgcaatttcagtcctgatggataatgaaagagccactcttggactttcacgaaaagaacatgatttaacctatcagtttgaccagatgagaggtattcgtaatcaggctgtttccagaaacatgctaattaaaggcaggcatattttaaaaataatcaactcatcactaaaaagataatgagtcatcgcatctcattacagcaccgatgactgggtgtttattctttctgaatacaaaaactgactgaaagataaggaaagaaagttttcttacctgtttgtcttacgcaatggtgaactggttcaccatgaggtcaacaaatcagagcttctttgagaggtttaacatgcaatatgcattgcttgatggatttgaacgaaagtttttgctggatgctcttgaattcggtgttctgaaggactggaaagaaaatccggtaaaagaacttcctgatattgatgaatctgctcaccccttccatgtctgttatggtggatatttattaaatcctggtgtttcagattcagatattagcagaaaaataaaagaccagacaggattctggctggcagctattgatgatacccgcatggattgtcattcaatagcttattatgatattcacacactccctctgatttcgtgtggtcatcaaaagatagttccttttgccgcgttaataaaagctgatgaatgcatcatttcaaaaatttcttcgtattctggttttgccgtaacagcctttttgagaattaaagaccaggatattgcaactaatatacttaaccgtgaggggatttttgcttttaatggctgtgaacgcagattcagacatccagtaagtgaagataactggcaacaggcagtatcagaagaacgtgctatccgttgtgccaaaagattaattcaatgtaaaggataacaaaatgaaactttttatcgcagaaaaacccgcagtagcgaatgatattgttaaggcgcttggtggcaattttacccgtcatgatggctggtttgaaagtgataatactattgtgactaactgttttggtcatattatcgaatcacagccccccgaaaactataatcctgaatacaaagagtggaagattgaaacactccctttgcgtctttatcccgtaaaataccagcctgtagaaagcgccgaaaaacaggttaaaacgattattgagcttatcaggcgtgctgatgtgaccgaaattattcatgctggcgatcctgatgacgaaggacagctacttgtcgatgaggtcctggaatatgcaggcaacacaaaacccgttaagcgcgttctgatcaacgacaacacccttccggctgtgaaaaaggcgctggcaaatcccaaaaataaccgtgacttcagaggactctatctcaaggctctggcgcgttctgtagccgacgcgatatacggtttatccatgacgcgtgcttacacaatcccggcaaaaactaaaggctataaaggtgttttgtctgtcggacgggtccagacacccgtgcttggcctgattgtaaatcgcacccgtgccaataaaaatcataaatccagcttctactacaccatgaccggacattttcaacgcggcgctgatgttatcagggcgaactggaaacctggtgagttcgcaccgctgacagaccgcaaattgcttgataaaacctgggcgaatggaacagcaacatcacttgcaggaaaaccagccacagttgaagcggcagcaacagatgataaaaaaacggctgcaccgttgccctttaacctggtacgacttcagcagtacatgaacaaaaaattcaaaatgactgctcaaaaaacgctggatatcacacagcagctacgcgaaaaatacaaagcaattacttacaaccgttcagattgttcatatctttcagacgaacaattcagtgaagcaccacaaataatcgatgccctgaagtcggtgtttgatcagccaatggatattgatacgacacgtaaaagcaaggcatttaacagcgcaaaagtaacagcgcatacagccatcatcccaaccgttagcgtaccggacgtaaacgcactgagcaccgacgaacgcaacgtttacctggcaattgcacaacactatcttgtccagttcatgcctgaaaaggcatatcaggaagtatccgtcgccattcagtgtggtgatgagtcgttttatgcccgtgccaggaaaactacagacagcggatttgaagcgtttcttggtgtggaaaatgccggggacgatgaagcagaagtcgaaaatgatgattccgcttttgatcttctctgtaaaattcgcacaggagaaacagtgacgacaaaagaagtggttgtgaatgagaagaaaacaacgccaccgccattattcaccgaagccactttacttgccgcgcttgttcgtgtcgcagattttgtcactgatccagtgattaaaaagttactgaaggataaagatcgggataaaaaagacgaacatggcggtattggtacgccagctacgcgggcttccatattggaaacactgaaaaaacggaactatatcaccctggaaaaaggaaaacttattccgacagataccgggtatgcgcttattgatgctctgccggatatagctgttaatccagatatgacggcattatgggcggaaaaacagacactcattgaaaacggagaaatgaccatcgaacagttcgttgacgaactgtacaatgatctgataccgatgatcagtaatgcgaacagtgctgaaataaaagtttcccccagcgcgccgtctggtcagtcacaacgcctgtcctctccttgtccttcctgtggtaaacagattgttatcaggccaaaaagctattcctgtacaggatgtgaatttaagatatggaaagatttctgcggcaaatcattaaccgataaacaaattgaaacgttaataacaaaaggagttacaagtgaattgaaaggtttcattagtcaaaaaacaaacaaagaattttcagcaaaagtaaaactggttgacaaagcaaccgggaaactgggatttgagtttacacaaaaaagtaagaaataaatccagcagtagaaatcaaacatcgttgtagctactataggacaaggatgttcttcaggaattgtacaatgaaaacaaaacaagactggctctttcagttaagacgttgctcaacactcgacacacttgaaaagattattgaaaaaaaccaaaacagcctccccccttctgagcttgagtcgtttaatgccgccgccgatcacaggcttgcggaactcacaatgaataaactctacgataaagtccctccatccgtctggaaatatgtatattagttttcatctattaatattagatgtttgatcgacacaaacatcagcaatccctatacacctttcatagaatgaattgaaccctgtatatagcctgtctgaaatggatatctggcaggctatcttaatagtgttataggtggtatgaatgtttttcctctacgagacctacaatttcttctactacctgataaagttaattgtcattcagccacaatatatttgtgtctatatgatattcttttttttcaatgcagggatagcatatagcatcaccaatgatatcgaggatcaagtatgtcgatggcttttattcgtaagtatgttacatgctctgatgattccccccgcagttatcatgccacttatcatgccaccacaggaaatacttcaggaaacagagaaaaggcaggaactacatgaatcaatacccaaaacatgcaaattaaaggcactggatgctcaacaaggtggtttattcggcgttgataaagatgaatgggtattccctgacaataaatcattctatctgcctgaaaagtaccgtccagaaaacaggattacggaactagccatgatgaaagaaggataaagacctatgaagatattcaaattgtttgttctttgtatcccccttctgtttagtctttttttcgctggctacggcattttgtcaaaaaatccatttgaaacactaccgtgtctgtccgccagtgctttttgcctttttctgtttgacatactgaggcgatcatttatgaagtgaggtgtcttgatgttaacgttgaggttgagaaagttttgttggttcttataattatagaccggattaaatcatgaaagaatacgaaaaaacggctttaatatattccttaaaggaaagcaatacattagttcttcggattatactaatctctattttagttgtcggggtgatttcaggcgcgatatacttatataacttggcgatctcgttgtttgattcaaacccaacgtctgtgcaattcaccttttgcggagtaggctgttttattgctctattacttcaatggatatctaatgttgatgcaaattacagagaaagaattggggagcaaccaagtacaataaaaaacattgtacaatatttatttgcagccattattaccattagtttcattacaatggcattaacagccatattagtcttaaaagactcgtccaacatatggctcaacattacttttattgcattattactgtccatttttgtagctattatttctgtttggggttgactttttttcttaaaaagcccgaaaaccgggcttttttcttaattagtgcatgtcctgtgaatcgtcacgctgctgctgcgattcctgatgatcttctctggcctggacaaattgttttccaagagcatcttctgccatttcacgagtgaatccgtgattaagcaaatcggattcggccttctccctttcgaacttcagtccttcccctctgaacttgtcctcaaagcgatcaattgcctcaagaatcttgccgtcttccggcgtgcaatcccgtccctgtgctttctcaatttcatgacgctccacgcgttcagcatttttcattacagcgtcaatcccctgagaaatatgttcagactcgacgcgataaatgacagtatcgcgcttattgagatcatgtagctcgcattcaacccggccccactcaatagcatccttgagagagctgaaatcttttatttcagcattcagaccttcatgtgttgagaaatagacataatccttctgttgttccagtttattcacattttcaatagcccttgtactgaaatggatacctgtaattaccggaacacgagccgatgtttggtcccccgttaaaacttcagaaggtgtttttccagtgatcgcggcaaattgctgctccgtaacatccactctggcaactgcatcaccacgctctaagccatgcttaccagcgaccgcaaggcgataaagaccaccttcccccctggtaatttccgcctccacaacgatatccccattgcaggaactgaactgagaacggtctttaaccaggaagttttcaagcccggagatcatatgctcgttagctgaaatactggcgagtatctcttctggtgattctctggacgaatcccccgcctgttccatcactgccatattagcgtcattaacagcgtccttaattcctttaaaggcgatttcttctcttgttacaggtgtgattaagatatcatcctggttaagcccgtgctcctgaagcatcttatttttatattcagatgcgtcgtgcaatgactcaaaagtcttaatatcttcactaaactcatccttcgaaaaagaaaccgcatacactggagtacggtattcttcatatgaattggcaattatttcaaatggcctatcaaacgttactaatgccccctctggataagaggataattcatcggttgagacagttttagacataagcacaacagtatcaaaaccatcaccatttaaataattgctttcatatttttctattgcagaagatttgctttcctcataacactgaatagccgcatctttagaatgaaagacgataccttcattcaaatcatggaagcgactaaagtttatacaataaatttcctgtttattatgcacctgcgcagtagcctgatcgtgttgagtagtaagctgctcctgaatcagagcctgtgttctgtcaatacctaactcattcacaattttgcaaaattcttttgcgtcgttttcattatcaaaactggcaacgtcaaaaatatcatcgctgtctccaggtacatgtcccagcacttcccaaatctcattttcatcgctatccagagatttcaaatagccaaattcaccatttgtgcctttactaagcatctgtgaatccagggtgtttgccctggtaataacaccaggatcatatgaagatgtggcctgctctgcgacctgtgcttgctccgcgacctgtgctttctccgcgacctgtgcttgctccgcgacttgtgcttgctcggtggcctgtgcttgctctgtggtctgtgcctgttcggtggcctgttccttcaatgcatcacctttctctattctggattcggactcctggctattttcctgtgtttccacctgctcaaacttattaccctgaagttctgcttttaattccagcatcatctgttgatactgctccgggcgtaaaataatcttcatgtcctgctctgcggcaacttcagcgcacatttttttgaaatcttcagagccggtaagtttgagtacaccaccaaacttttccctggaatactcaagcattattccgatctcttcttttgagggatttttacccgcaacgacaaagttccctttgtcggtaaagacaggcttttccgattcctgatcgcgataaacaatcctggaatcctgcttatccatcacaagatcttttagtttggtgttaacctttttcgcctcttctaagcggcgctgggaatccaccgctttctgaagcgaaagttcgggttcgtcagcagaaatggcgttgatttcatcgaagttgagatagcttttgagacgttcaagggctttcatttcatctttatccttatgccagtcagcatgatattgacgaataatgtgtcgcccatctgtgtcgagttcagaaagacgctcaagtgtggttagttttttgtaaacaatcacacccacggcaatatcacgctgttcacgtggtattaacttcaactcgcgtctcatctctcgcagatcattatacagcttgccacgctcaaacctgatagtatttcgtaatgttttttcagataaattcagtgagttaagacgctcacgagcttcatgatgcgtaaggcgtctgtaggttggatagcgcgtatatggcgtgttttctaactgctgtgaataaacttcaagcagaaaggatttcgcatctttccaggcaagattaatatgctttgtcagaaaatcagatgcgttcatattacgattccccacagaaaaccggggggaaccgtcctttgctgttctgattttatgctgcgctggaataatattaaaacgctcggcggcagaagacagaaacctgacaggatcaatatttctgcgaatttctgccatcgttgtaatttcgtttttctctgccgcctcattcagagtctgaaacatcgtttcacacaaaaaagaagagcgttcaagactttttattcctgactctgtgaattgtctatcataatcccgtcgcacatcctgaccaggatgttctctttgcggtaattgctctgccagatcacgctgcgaaatatctgacaatacactgatagagtcgggtcttgtgaatccattgattccgtaaaccataccgcgttggggcatacgtgacaatccgactgttgcttcagattgacggattctggcaaactttttaggacacgacttgtaacctcccgctcgtcctgacgtttgctgagaatttctttcgttaagtttttctcttgagtcatattcttttatcctctctttcagaaattcaatctgctctgcttcagataaacttgtatagtccttacgaacgctggcgttgagaaaaacatgtttaatctcgtgactggttttgtttacccaggtattgagacgtttttctatttgcttaggcgtaggtttttgaagagtcaactttccctcttcaatatagtttttacgaaacaacgggcttttcagattagtgaactttttatctcccggtaacttaacagcaatatattcactggcctttccttcatttcttatcctaacctcaccatattctgcaacaatctgtttgaatacagcataatcacttactttttctttttcaattcgataattcaattcattcttaaatgcagaattacgctctacatcaagatctgcttttactctctttaaaataacactataatcactattttttctcggaaagtccttcgggctggcaagattatatttattgttaatatgctcctgtattgcatctagctgttcgatagtatgacctttccctataaggccaacaggatcaagtttatctcctgtaactagattaacctttggaatgacaatatgaatatgaggctttctttcaattaactctcctgtactattatcctgaatatgccggatttttggcaaatgtgcttcagcatagaaagaatattcttcaggatgataagcattcatcaataattttttataatcatccacaaccgcctttaacatttcatttgatacgtgactttcatgaaaagacaacgtaatgtgcaaataacggtcctgtttgttgtcttcaatagaattgataatcttatctgtagtctggagatcaccatcaagaacaacacgatgatcaagttcatcacgtgtgtactgacgttctgctttgcgaccatttatcaggtaatcaacaataccgtcattaccaccaccatatctgacaatcatttggctatctcctgaaggcgatcacgaataccaatcagcacatttaaaatctttttataaagcgcctctgatataataccctttaaatgatctgagtttaagcggtgagctatctggttaatattattcccagcccaacttaactgagaaagacaccgtttgtattccgggatatggcgtttatctgatgtgtagttttttattttaccaatagtaagcagcctgaaaaattcagacttactaatttcaagctctctgattgctctgtcaaatggagcatactcttcttctgtaagtctgaatgtcacatgaacacttttgttggcttttttcttcataagtcctcaaggttcgtagaaccgcactagaacggctgcgccgttcggggttgcaaaggggcgtcccctttggcacaagcattgtaacatgcccggaacgggcttgtgtacaaagcttatcgtgcctgtgttttagaaggacaaaaaaatgccgtgcatacagcccacacaatgactcacataatcacccacaactcaaaacacacagcccacacaatcacccacactttaacccacaaaaaagaccacaaccccattgacaacccacaaaacaacccacataatcacccacacaaacggcgagcaaattgctttaaataaggtattatgccaatgtaggaggtagagagagagaggaaatgtaacaaatgaaaaagatcgagagtttattatctccaatatgcgaggctataaacgaaacaaaatcgaaatcaaaacaggctgtcttcaatatgtatttgcaaaatatacttgaagcaaagaaatattatacatgggagcaaatagctgattacataaacaacaacaccaagacagaactagcccaaaagacttatataaatatgacagagagggctaaaaaaagacaaaaatgcactgaaccaaaagaacaggcaaaaaccatagatgtaattgttcagaatgaagctaaaggcgatgaaccgagagggggggtaaaaggttttttttcaaacattagtgagaacaaaaaagaaatagagcacgatccaagtgctacgaatgaaaaatttataaataaatatctttaagtaaaggagcattataaatgaaaaactcaatcaatttcatccttcagggtaaaggtggtgttggaaaatcattcgcgaccgcaatactggcacaatactttattgatgaaaatcacatggataatatcgtagtcggtgacacagacccggttaatacaactacggttaaagtaaaaagattaaatgcagatttgatacaaatcactgaaaacagcaaagtaatacaatccaaattcgatccaatgttcgaatcgatgctgaccaatagtcagaatacttttgttattgacaatggcgcatctacatttttaccgttaattcagtatttcaatgataactgtgttatggacatgtttgaagatgtagaacaagacgtttatatccatactgttatcgttggtggacaagctcttgcggataccttgcagggatttgaagaactgaaagaactggttaaaggaagtaaggtaaaacttattgtctggataaatgaatttcagggtattccagcacttgaaaatatcccattaatagaaactaaattcattgaaaaaaacaaggatgtaatcgctggcgttgtggttattcaggacagaaaaagtgatgcctttgcctctgacatcaaagagctaacagaaaaatcactaacactgaaagaagctcttgagtccgaccattttggattaatggctaaatcacgattaaaacgagtcttcaatgacatttacaaacaattagatagcatctatgacgatgaatacggtgaataatatgagtacagttaatcagccagaattaaaacagcctgaaaaggctgtttccagtgaagatattgataattttattgttgatgtattcaaggagacagggcataaaatatcaaaagatgatccagttatttcattaatttttctgaaccaaaagatacaggaaaaattcagcaatgagttacaagctaacttcacagccctgtctgagggcttcagacaggtcgtttcatctgtagaaaatgactatattcaaagattcaagaatattgttgagacgtgcggcgatctggataatgaaataaaagaaaaagtagaagagggaaaaaacgatctaaaagaaacaagtgttgaggtaaaagaaaaattaacagatgatattattgaactcatatctggaattaaacgcaaccaggaaaaaaacaacaaattatatgaagaaaagttgaagtcattatctaaggctgtaaaacccttcagtacaagaacagccattgcaatttgtgccttgtgcacattatgcctgtctgcggcattttctggcgcaacctggtatgttgcacaacatgaaaaagaggcaagcctgcgcttctatgcaagagcttttcttgatatgaaaaaaataactgaagagagcatgagaaaattaccaaaatcagaccagcaaaatataaaactcaaactagacgaaattgattcaagaaaaccatagatatgaaaaggagtcactaatgacaacttttaccgacgacgacaagaaactaattaaagaaatcagggagcgaatcggcagcctggacgtgcgagacaatattgagcgtcgggcttatgaaatttctctggcatcgctggaagcagagccagttatgttctgtatatcaggacaaaatgtagattcagaagaacatgtatcaaccagcaaagcggttgttgatgcctgggttgaagaatggaatcaggttgacggaagtcctggcgaaccactgtacaaaactatgccactctactgtcacgctgccttgccagcgccggtagtgcctgaaggactggttaaagcggtgcgtttttatgagcaggtaaaaaatgagaatccgccagttgggactggtgcgtggaaagacgctgttgactgggtgctcgaagaggcttgccaggctgtaaatacagacatcaaaggatgaacgatatggcaaccaacaatcgtaaagccaagatgctaatttcccgtgtatacagactttgctaccccagccagtggttgagagttagcaatcgccgtgtggtgttgttctcattttctggaattgccagagagggaatcaaagataagcgcagcgcggcgcaaaaccgctggaaaaacaacttgcgcactaaaggagcctaatatggctattgccgcaagttacaccatgcatctctactgtgattgtcgccagtgtacaaatggtaaatatcagtcgccagacttcggtgagtatatcggtacgtcatgggctggctgtgcaaaagaagcacgtaaagatggatggcgaataagcgccgacaaaacacgtgcttttgcgcccggacataaagttttgaggattaacaaatgacaacatttaccgacgacgacaagaaactaattaaagaaatcagggagcgaatcggcagcctggacgtgcgagacaatattgagcgccgggcttatgaaattgctctggcatcactggaagcagaagcgccaaatttgcctggtggtttcacaattgaagaagcaaaagaattacacgaaaatctggtaaaaagtcacgtaagcaaggctttaagtggcgaaaaaatgaaaaaagaaaatcgtgatgccgatttgcgctggattcatggcgtaatagttcaggccgcgtggtttgtgaaagcatcactagggcagaatgcatagtgcgtacctgcttttctcctggcaacggtggatcttccgcttcctcgtcactcgctcgctatgctcggtcgctggactgcggcgagcggttagctatcaaaaaaaatccccgcacaacgcggggatagttttatttatatgcaagttcatgacgtgccgcctgagccagaaaatggctacgatctttgtatacgccgccactttctctcacatatccatcaatacgacgaatcaatacatcaggcaatgaaatattaatacgttgttgtttgccctcaatttctgacaaatcaacatcaattacaaaccagctatcacagtggttataatttgggttggcggaataagtcaaacacccttcatcatgaatatcatcaacagaatgagcaccgcttattaccatctcttccacgattgctaatatcgcttcacgcgccattgcgggtatttctgcctgagaatcagcagcagaaacacatccaaaatcaaagcaatcaaaaaccggaacggtgataccgtatgctgtatgatcatctttcggtgtttcgacaccaacagaaaagaacatggctacctccaaagtcggcggggattaaatccccgccatttttttgatcgatctgacagtacctagcggcaagtcctttttaggatgaggaacaggaaaagtttttcctgttattggcgaccaccatatctggtgactgcttgccttatgccgtttcaactcgcaaccagcagctatcagttctttcaacaggtcagcagatttcatatgtcctccctaacctgaaaacaattatacacacgcatacacacaaaagcaaattatttcattcgtatgacttatgaaacacactgtaaagacagttcaatctttacagtgtaaatcatttatccagttttatcgctatgcatgtgatacatagaaaatcatatagtgttttactatatgatacctgattgacacttttaactgcacatctcatcatttacatcgtaaagacaaacatagctttacaatgtaaagctatataattaaacactccgtgtccctgataaggaaaaaaaatggctcaaccaaccccagaaaagatactggcaatcatagatgatcatgatcgcgcacaaaaaaaacaacgcaacaaaaacgtcttcatttatttatgtctctgcttggcaattattggagtggtcgcgcattcctttatatcaacgtttcgtcttgatggtgtagccgtccttacaattcttttgggcgtgtcagcaatcgcattttttctacattatgtagaatcagggaaaggccagattcttagcagtgaccgcatattgtccatactcgctcaaaccaaagattaccccacaattcgacgtaaagttgttaatcgcttgctctccggttcaaaactcacgggtaaagatgaagagtacatattcagtgaactgaaaaaggctgaacaaagcaacgaacgtgaaaagagattgcaagcaattaaagagtatacatcgtaatacaacgtaaagcatcacttgtaaatacaacacactacatcgtaataccagaaaacaccaacgccagcgagcaacaaaaaggggcgattaagcccctgcgcgatgattaatgacttctttttccagtgcctagctctggatcaagcctgacgttaaacacacctttaaagggcgcgtcaggctcctttccgtcctccacacaggactgtaaatacaaatcaaccgatgttttaaattcccgttccaggtcagctaatgtttctgcctcaaaagtcaccagatctcgaataaatgccagctttccatgcaggatattattttcaaaatccggctcaactgtacctaaatatcctttatattttaaatgtttcataaaaccccagcctctttcaagaaaagttatcagatagaagggtgaaagaaaataccagggagcagcgaggccacatacccctaagcgcagcgcaaccgccggaaaacgcaccacactgtaaagacaataaaatctttacaacgtaaagctaactatgtaatacaacgcgctacacattgacatcctccacgccctaaaggacgtggattcctacgacgttcaggctgtcgcctgaatcatttcggtgggttcctgcttcaacgagcggcctgactgcaccatctctccacaggcaagaacggcgtgccccgccgctaaaatgttacgagcgccatttacatcggcgttcgctgtatatccacatacctggcatctgaattgactttgtgacaggcgattttctttcgctgtatgaccacagcacgtgcaacgctggcttgtgtacgctggcggaacagcaagcacctgaccgccacgccagagctgcttgtactcaagctggcggcgcatttcataccagccctgatccagtatcgaacggtttaaacctgattttgcccggacattgcgccccggctggctgaccgtacccgctgctgactttgacatgttgctgaccttcaaatcctcaatgactatcattgcgtggtttttgctgacggtcgttgtgactttgtgaaggtagtccctgcggatatttgcgatacgggaatacagtcgctgtattttgcgtttctgcttctgccagttgttgctgaatttgaccttgcggcttaactgtcgctgaagtctcgccagcgtcttctggtttttctgaaaactgtttacaggatcaaaaatagtgccatctgacagcgtggcgagtttagccacgccagcatccagcccgaccattgatactgaagggtgaaccggagttgatacttcactttctgtctgaatactgatgtaccacttaccgcaggactgactgacagtgacatttttcacaacgcccgtgacctgacggctgttccggtagcgcatccagccaagtttcggcagaaaaatacgactgttttcctgatcgagcttaacgccctgcgggtagcggaatgcatcattctgtccccgctttttgaatcggggaaaagccgcccgcttctggaagaaatttttgtaggcccgctcaaggtctttcagtgactgctgcaatggctgtgatggggcatctttaagccattgggtttcagtggcatttttccactcaaccaaccacgaggccatccttgggtaaggaatatatttgttccctgcctcatggttctcattctgaagcgccagagcacgattgaaaacgaaacgacatgcgcctgcgaagcgcctcatttctcgctcctgttgaccaccgggtcttaactggaatttaaatgcctgtagtcgtttcattcgaccattttaaacaaaaaaagccaggtggaaaacctcgccttatatcctcgccctgaaggacggggttttacggcgcactggataagaaagggagagcattacactctccctatatatgactcaaactaaagcattatcccggttatgcgcccaccaaatgatttcgctaataatccatgcttctatcgcgggtgtttttacaggttccccatttacaatgcggtttgcaagctctatcatttcacatactgacatttgagaatctccaaagatgcatctgtcatttggtaacaggctgccccacagcctgttaccaaccccaaattagtatttgctgattactttaccctccttaatcatttttattagttcctgttcagaatattcttttccgtgttccaatgtggaatatatatcgccaatagtccatactccacactttttaatttctgcatttagccaggattcatgcagaataaacaacggttcgcaatcatttcctttttcataaacataaatagattcggtatcatttccagaatcagaagtaccaacgactttttctatatcgaaatgtttttttagaaaagttgtgaaatgcattttcatgctcctgccgctgagcggctttggtggttggggaccatcccctcccgatgtgtttataataggtcagaactgacctattatcaagtatttttccctccattcttcaaaaaaaacaccatcaaatacatatagttatattcatgtgatgcccgacagggcatggaaggggcgaaagaaaataccagggagcagcggggccacatcgccccgaagcgcggcgcagccgctgacgaacataccaggatgcacagggccatcccttcgccctgcaaagccagaacagaccaacaggccatgatcatgctgatttgcgccgcagaatgccgcagttagcgcgagcgacagcgagtttacgccgtcctggtgcattacagcagggcggggcgctgtactgcgcgtgtgagcgtcagcgagctacgggcgcaattgctcattgttcaatgcaactggggctattaagtccagccataaattcagttatggtttttgtagcttattccgtgatttcgtcatacgttaattctattttcatcttaatattccttaattacttccagaatcagaattctttttattccttttacaaagtacataatcagggtgttctccagctaaaagcagaagaaatttaaactctactggtgtaagtgctgtaccgcttgcagttccgacaggttcttctttgcgacgccaggtacgcggactcatgctaaatatttcggcacattctttctgtgtcaggccaattttttgccgcagacgtttaatgttttctggtgtgttttcatttggcattttttccctcactcatttcctgaatcatcatagaaacaatttctttatcattctctcttaatccgtcgctggcaaagtcgatagtgtcgaatgccttctcatgaaaaacaagatcggcaacagttttcaccgttgctttcgtttttcctaaagtcgcagacttagaaaaagtttttactcgcttcaccagatgaaacgtatcaccttctttattcagataatattgtctgtcaccttttcttatcttcatattgagatagtctccccttttaacagtaaaggggcatatagcccctttcttttaactttttccggtaatcaaatcgacatcttcctgataaagctccccaagaaccggaacaacgccttttttataatcacggatattatggcagtctgtaaaaatgacgacataagcctcgcctgttttttcatgtttaaggcaaattgtgcaaagcgtcacgcgcacaacagaaaacacatgaccagttgtagagacgatagcaggaaaagtagattgtttcatgtttaactcctgccgctgagcggctttggcgattgggggccatcccctctcaatgcattaataataggtcacaaatgacctattatcaagtattttctagacgagctttattgaaaaatcattttcaataaattcatctaacatctttaatataccagctttatttacgaaatcatcctccataatttcgatacttgctgatatttcacatgtaaactcaatgctcctgtcaaatcccgcaatcccagctaatgcagacagcatatgataattatcaatatttatattaccaataagaactttcatttatcctcctgatatggggggaatccccccatattaaaaattacaatctggttgcaagtccggtttgttcattaaataaacattcaagctgatcacaataaatattatcaaattttgatatttcttttactgtagctccacggacacgggaaaatgtcaccaggtatgtatcagagaaggttaatttgattttaaccaaattaattcccttcattgcaaaatttgaaggtaaacgaaagcaaagaccagactcaccattttcatcaaaacaggcaaagttctttgcgcctgtcatagcaataaagcggtttccaccaagctgattaagaatttcagtagcaacaaatttggcgtggttttccatttttaagctcctgccgctgagcggctttggtgattggggaccatcccctctcgatgtgtttataataggtcagaactgacctattatcaagtattttttcctcctttctttaaaataaatatcgttaaatacaaatatttacattcatgcaatgcccggcagggcatagaaggggcgaaagaaaataccagggagcagcggggccacatcgccccgaagcgcggcgcagccgctgacgaacataccaggatgcacagggccatcccttcgccctgcaaagccaggacagaccaacaggccatgataatgctgatttgcgccgcagaatgccgcagttagcgcgagcgccagcgagtttacgccgtcctggtgcattgcagcagggcggggcgctgtactgcgcgtgtgagcgtcagcgagctacgggcgcaacattacattgctgcattcgcctggcattctccacgccttgaaggacggagttttactgcgcaccagataaaaaaaggggcgattaagcccctgtattcactattaacaatttaacatggttgcaggggataccccctgcaactattttcttagtagtatgatgtgaactcgtgtttttcttccggtgatcctttatatgctgtttcgaatgactcaatttcaattgctggcgtactgtaataatcacgcactcgccgttttaatggctcaccacagaaatcattgagtaatggggtcttatatccgctcattgaatgagtccgatgaactgaagcgcgaatctcctggacagttacggtttttttgccatgaacagaaataacctgatagaaattaacgttcgtttgctcatatccccaggaagatacaaacacatcgccaacagaaacagtgccgttattaaaagttaatgttttcatttttatctcctgccgctgagcggctttggtggttggggaccatcccctcccgatgtgtttataataggtcagaactgacctattatcaagtatttttccctccattcttcaaaaaaacaccatcaaatacatatagttacattcatgtgatgcccgacagggcatggaaggggcgaaagaaaataccagggagcagcggggccacatcgccccgaagcgcggcgcagccgctgacgaacataccaggatgcacagggccatcccttcaccctgcaaagcccaacggactgacaggccatgatcatgctgatttgcgccgcagaatgccgcagttagcgcgagcgccagcgagtttacgccgtcctggtgcattgcagcagggcggggcgctgtactgcgcgtgtgagcgtcagcgagctacgggcgcaacaacacaccaggcaaaatcgcatcctgaaaagttaccctgtaacatacacacaatgtaaagcgcaaaaaacaattacattgtaaagacacaaacatctttacaacgtaactataatgaatacaatgtaaagacaaataaacctttacactgtatatccgaggtttctatggggagagcattacttgtcgcatcagataaaggcggtgtaggaaaaagcaccacagcaacaaacctggcttcttatctggtaaataattcacgaacggtcatcattctgaagaccgataaaaacaatgatattcttagctggaacgaaaaaagaaagcagaatggcttattaccggttcctgtttatgaagagtatggcgatgtatcagaagtcattaagcgcctgaaaaaaatatgtgaagtgctgatcattgactgtccagggcatgacagcaaggaatttcgcagtgccttaactgtagctgacattctgcttactctcgttaagccgtcttcagatttcgaagcagaaacgctgactcatgtaacagaaaaagttcgcacagctcaacagatcaatccagacctgcaaccctgggtacttttcacgagaattaacacgacaaaaccacgccacagaaaagcagcgattgatctcgacaagttactccgggagaacccggtgtggatacagccacttcgtacacgtatttcagatttagatatttttgaagcggcctgtaatgaaggcgctggcgttcatgatgtacgtcgcgcatccagcctttctacagctaaagcacaaatagagcttttggcgcaagagttaggcatcaatccctaatggatgtaatacgacagctttacatcattagctttacacagtaaagctaatgtaatacacgaaaggtgatataatggctcttgacttgaaaactccggtaataccaggacaaaaaacagaacaaaccaatgcagacacagcccgattcatcaatgaagctacccgcaaaaaatcgggagcaactaaagtgaccaatgtccggcttggggacgtttacgaagatattctggaacgggaagcactgcgaacaggccagacaaaaacagcaataatgaaagcggctcttgcagcttacgaacacggcctggacgaaaacggaaaaaatcactggattctacagtcagccaggctgaaatgataaagcccttcggggctttatcccttacgttttaattgtttcttctcgctggctttcttacgggcatcgagaaccagttgcgcataagttgcgtgtgctttttttactgtaccagcaggtttcccgtaaaggtcgtaacgtgttgcgcctggtacagtacaattctgaagatattgccaccggaacgtcatcacctgaaccgcacaattccactcttcaatcgtcagatccacatccgggttatccgccaggtatttctcaacgtcctggagaatcccgcttttcaggggcaagttctttttttcgtctgtccatagttcaggaaaaacagcacgaactttattgaaacacttttcaaaatattctttcggatattttgggggaaaagtgatttgttttttcaaataccagggctgaggctgctttttatgtgttttctctgctacagcatctttcttctgtactttcttgttttcattaactgctgatttttgtacttcctgcggcttttcattcaccacaggattttctggcatgaccagaacgcggcgttttttgaccacaatcacgggtgttttttttggctgcatactcgcctcaataattgctgtcatattgactaattataccattttcagcagttaatatcctgaaaatacatggaaaagggggtatccgtacagaataccccctttgcaaaggcgcttaatgccagaaccacatcatccccaaaaaggcgggctttcgcccgcctccgggttgctacttaccgttggattcgtaagccagacttgccgtaacctccctgtttccatctttcagccggacctcgcacaaacgattccgggtcagatacgtgaatattaacaatgtgcagcacacgattaataaacaccaggtcagggcgtttttcggctgtttcatggccttcttctccttgcgtaacgcgcggtaagaggctatcctgatgttgttgaagcattgggatcgcctcgtgggtgtactgaccccaaaaagttggacagttaaacacgaggcatataggtctgattccgatattcaattggagtcagaccttttaatttcaggctaattcttctgctgttgtagtattcaatatattccgtaacagcatccttcagttcgcttatattactgaactcatcaagataaaaacactccgactttaaggttccaaagaaacactccaccacagcattatccagacaattgccttttctggacatgctttgtttaataccatgttctttaaggatattttgatatcttctcatacgatactgccatccctggtcagagtgcagaacaggatgctcgtgaggattaagctttttgaatgcctgatcgagcatattctcaaccatgttcatcactggtctttccgaaaggctgtaagaaataacttcgttgttgaagagatctattactggagacaaatacagcttgcgcccattgactgcaaattcagtaacatcggtaacccacttctcgtttggccgcgtagccttgaaatctctttggagaacattaggggcggtttgccctacctctcctctgtaagagcggtatcgcttgaccttaatcgctgctttaagtgagagggttcccatcaggcgctgaacagctttatggttaatctgtttcccttctcgatgaagagacagcgttaccctacggtatccgtatcggcctctattctcgtgataaatctcactaatacgctttttaacgtccgcatacttgtcaggcttgctgagagcctttagatgataataaaacgtactgcgcggtatctccgcagccctgagaagctcatcaagaggataaaactgccttagctcgttgagtactttcactttttcgtgggatgagctaaggctttcagcttttttagatacataagccgcgtttcaagaaatcgaacttgcctttcaagatcctcaatgcgtcggtcttttgacagctccaatgctgatgccgctttttctggatcaactgatattgcaatgtttcttttggtgccaatcttgagcgcgcgtaaaccagcttctccgcgctcttcatagaccttcagccacctggctacagaaccactaccagcaagcataaagtgagcagcagcctgattaagggacatgtgctgctcgatcacagctttcacgaccttaatacgcaactctggatcagcactaacgcctttaggtttgggaattaaacctttttctccatgtttttcatagagggcaacccatgtcctgacctgggttcgggggacaccaaaacgtgccgagatgatcctgtaaccatcatcagttgtgaagtagtgattcacgacttcaaggcgcttttcaaaagggtattttggctttgacatattaggggctattccatttcatcgtccaacaaaatgggtgcagtacatgggttaatgaaaaattaactacggggctttcttctttctgccgcacaacaagcatcagcagcagttccaggcttccggcaaggcgatcaacgacaaggtgcggatgtatgggcgcatcggtcaagcgttgattgaggccaagcaaagcggcagcgatccgttcgccgccatcgaggccgttatgccctgggacaccttcgccgccagcgtcaccgaagcgcaaacattggcgcggcctgccgactttgatttcctgcaccacatcggtgaaagctatgccacgctacgccgctacgcgccgcagttcctgggcgtgctcaaattgcgggctgcgcccgccgccaagggtgtgctcgatgccatcgacatgctgcgcggcatgaacagcgacagcgcgcgcaaggtgcccgccgatgcgccaaccgcattcattaaagactaactaccatggtccatatgaatatcctccgtcggggtttgtaccgtacaccactgagaccgcggtggttgaccagacaaaccacgactcagtcacctcctagctgactcaaatcaatgcgtgtttcataaagaccagtgatggattgatggataagagtggcatctaaaacttcttttgtagacgtatatcgtttacgatcaattgttgtatcaaaatatttaaaagcagcgggagctccaagattcgtcaacgtaaataaatgaataatattttctgcttgttcacgtattggtttgtctctatgtttgttatatgcactaagaactttatctaaattggcatctgctaaaataacacgcttagaaaattcactgatttgctcaataatctcatctaaataatgcttatgctgctccacaaacaattgtttttgttcgttatcttctggactacccttcaacttttcataatgactagctaaatataaaaaattcacatatttgcttggcagagccagctcatttcctttttgtaattctccggcactagccagcatccgtttacgaccgttttctaactcaaaaagactatatttaggtagtttaatgattaagtcttttttaacttccttatatcctttagcttctaaaaagtcaatcggatttttttcaaaggaacttctttccataattgtgatccctagtaactctttaacggattttaacttcttcgatttccctttttccaccttagcaaccactaggactgaataagctaccgttggactatcaaaaccaccatatttttttggatcccagtcttttttacgagcaataagcttgtccgaatttctttttggtaaaattgactccttggagaatccgcctgtctgtacttctgttttcttgacaatattgacttggggcatggacaatactttgcgcactgtggcaaaatctcgccctttatcccagacaatttctccagtttccccattagtttcgattagagggcgtttgcgaatctctccatttgcaagtgtaatttctgttttgaagaagttcatgatattagagtaaaagaaatattttgcggttgctttgcctatttcttgctcagacttagcaatcattttacgaacatcataaactttataatcaccatagacaaactccgattcaagttttggatatttcttaatcaaagcagttccaacgacggcatttagatacgcatcatgggcatgatggtaattgttaatctcacgtactttatagaattggaaatcttttcggaagtcagaaactaatttagattttaaggtaatcactttaacctctcgaataagtttatcattttcatcgtatttagtattcatgcgactatccaaaatttgtgccacatgcttagtgatttggcgagtttcaaccaattggcgtttgataaaaccagctttatcaagttcactcaaacctccacgttcagctttcgttaaattatcaaacttacgttgagtgattaacttggcgtttagaagttgtctccaatagtttttcatctttttgactacttcttcacttggaacgttatccgatttaccacgatttttatcagaacgcgttaagaccttattgtctattgaatcgtctttaaggaaactttgtggaacaatgtgatcgacatcataatcacttaaacgattaatatctaattcttggtccacatacatgtctcttccattttggagataatagagatagagcttttcattttgcaattgagtattttcaacaggatgctctttaagaatctgacttcctaattctttgataccttcttcgattcgtttcatacgctctcgcgaatttttctggcccttttgagttgtctgattttcacgtgccatttcaataacgatattttctggcttatgccgccccattactttgaccaattcatcaacaacttttacagtctgtaaaataccttttttaatagcagggctaccagctaaatttgcaatatgttcatgtaaactatcgccttgtccagacacttgtgctttttgaatgtcttctttaaatgtcaaactatcatcatggatcagctgcataaaattgcgattggcaaaaccatctgatttcaaaaaatctaatattgttttgccagattgcttatccctaataccattaatcaattttcgagacaaacgtccccaaccagtataacggcgacgtttaagctgtttcatcaccttatcatcaaagaggtgagcatatgttttaagtctttcctcaatcatctccctatcttcaaataaggtcaatgttaaaacaatatcctctaagatatcttcattttcttcattatccaaaaaatctttatctttaataatttttagcaaatcatggtaggtacctaatgaagcattaaatctatcttcaactcctgaaatttcaacactatcaaaacattctatttttttgaaataatcttcttttaattgcttaacggttacttttcgatttgttttgaagagtaaatcaacaatggctttcttctgttcacctgaaagaaatgctggttttcgcattccttcagtaacatatttgacctttgtcaattcgttataaaccgtaaaatactcataaagcaaactatgttttggtagtactttttcatttggaagatttttatcaaagtttgtcatgcgttcaataaatgattgagctgaagcacctttatcgacaacttcttcaaaattccatggggtaattgtttcttcagacttccgagtcatccatgcaaaacgactattgccacgcgccaatggaccaacataataaggaattcgaaaagtcaagattttttcaatcttctcacgattgtcttttaaaaatggataaaagtcttcttgtcttctcaaaatagcatgcagctcacccaagtgaatttgatggggaatagagccgttgtcaaaggtccgttgcttgcgcagcaaatcttcacgatttagtttcaccaataattcctcagtaccatccattttttctaaaattggtttgataaatttataaaattcttcttggctagctcccccatcaatataacctgcatatccgttttttgattgatcaaaaaagatttctttatacttttctggaagttgttgtcgaactaaagcttttaaaagagtcaagtcttgatgatgttcatcgtagcgtttaatcattgaagctgataggggagccttagttatttcagtatttactcttaggatatctgaaagtaaaatagcatctgataaattcttagctgccaaaaacaaatcagcatattgatctccaatttgcgccaataaattatctaaatcatcatcgtaagtatcttttgaaagctgtaatttagcatcttctgccaaatcaaaatttgatttaaaattaggggtcaaacccaatgacaaagcaatgagattcccaaataagccatttttcttctcaccggggagctgagcaatgagattttctaatcgtcttgatttactcaatcgtgcagaaagaatcgctttagcatctactccacttgcgttaatagggttttcttcaaataattgattgtaggtttgtaccaactggataaatagtttgtccacatcactattatcaggatttaaatctccctcaatcaaaaaatgaccacgaaacttaatcatatgcgctaaggccaaatagattaagcgcaaatccgctttatcagtagaatctaccaatttttttcgcagatgatagatagttggatatttctcatgataagcaacttcatctactatatttccaaaaataggatgacgttcatgcttcttgtcttcttccaccaaaaaagactcttcaagtcgatgaaagaaactatcatctactttcgccatctcatttgaaaaaatctcctgtagataacaaatacgattcttccgacgtgtataccttctacgagctgtccgtttgagacgagtcgcttccgctgtctctccactgtcaaataaaagagcccctataagattttttttgatactgtggcggtctgtatttcccagaaccttgaactttttagacggaaccttatattcatcagtgatcaccgcccatccgacgctatttgtgccgatatctaagcctattgagtatttcttatccatttttgcctcctaaaataaaaagtttaaattaaatccataatgagtttgatgatttcaataatagttttaatgacctccgaaattagtttaatatgctttaatttttctttttcaaaatatctcttcaaaaaatattacccaatacttaataataaatagattataacacaaaattcttttaaaaagtagtttattttgttatcattctatagtattaagtattgttttatggctgataaaagcgcttttgaagctggggtgggcgaagaactccagcatgagatccccgcgctggaggatcatccagccggcgtcccggaaaacgattccgaagcccaacctttcatagaaggcggcggtggaatcgaaatctcgtgatggcaggttgggcgtcgcttggtcggtcatttcgaaccccagagtcccgctcagaagaactcgtcaagaaggcgatagaaggcgatgcgctgcgaatcgggagcggcgataccgtaaagcacgaggaagcggtcagcccattcgccgccaagctcttcagcaatatcacgggtagccaacgctatgtcctgatagcggtccgccacacccagccggccacagtcgatgaatccagaaaagcggccattttccaccatgatattcggcaagcaggcatcgccatgggtcacgacgagatcctcgccgtcgggcatgcgcgccttgagcctggcgaacagttcggctggcgcgagcccctgatgctcttcgtccagatcatcctgatcgacaagaccggcttccatccgagtacgtgctcgctcgatgcgatgtttcgcttggtggtcgaatgggcaggtagccggatcaagcgtatgcagccgccgcattgcatcagccatgatggatactttctcggcaggagcaaggtgagatgacaggagatcctgccccggcacttcgcccaatagcagccagtcccttcccgcttcagtgacaacgtcgagcacagctgcgcaaggaacgcccgtcgtggccagccacgatagccgcgctgcctcgtcctgcagttcattcagggcaccggacaggtcggtcttgacaaaaagaaccgggcgcccctgcgctgacagccggaacacggcggcatcagagcagccgattgtctgttgtgcccagtcatagccgaatagcctctccacccaagcggccggagaacctgcgtgcaatccatcttgttcaatcatgcgaaacgatcctcatcctgtctcttgatcagatcttgatcccctgcgccatcagatccttggcggcaagaaagccatccagtttactttgcagggcttcccaaccttaccagagggcgccccagctggcaattccggttcgcttgctgtccataaaaccgcccagtctagctatcgccatgtaagcccactgcaagctacctgctttctctttgcgcttgcgttttcccttgtccagatagcccagtagctgacattcatccggggtcagcaccgtcggaaaagtggccatcatttgacgaactacagcccgggttcagcacactgagacttgtaaaaaaaaaccccgcgcggggttttttttttaaaagcaccgactcggtgccactttttcaagttgataacggactagccttattttaacttgctatttctagctctaaaactattggccacgtttaaatcagaatctattatacagaaaaattttcctgaaagcaaataaattttttatgagacagtcattcatctttctgcccaaccgagtgaccaagagaggatgaagcatttgccgagtagttcagcacactgagacttgtaaaaaaaaaccccgcgcggggttttttttttaaaagcaccgactcggtgccactttttcaagttgataacggactagccttattttaacttgctatttctagctctaaaacagggattggctgagacgaaagaatctattatacagaaaaattttcctgaaagcaaataaattttttatgagacagtcattcatctttctgccctttcgggacattcaggagattttcgccggacgtacgcattttcagcacactgagacttgtaaaaaaaaaccccgcgcggggttttttttttaaaagcaccgactcggtgccactttttcaagttgataacggactagccttattttaacttgctatttctagctctaaaactaacacgccacatcttgcgagaatctattatacagaaaaattttcctgaaagcaaataaattttttatgagacagtcattcatctttctgcccctccaaaagcaaaaacccgccgaagcgggtttttacgtaaatcaggtgaaactgaccgacctgttaccaatgcttaatcagtgcacgaagttcctatactttctagagaataggaacttcggaataggaacttcttttgcggccgcaagatccgctcatctgtaacatcattggcaacgctacctttgccatgtttcagaaacaactctggcgcatcgggcttcccatacaatcgatagattgtcgcacctgattgcccgacattatcgcgagcccatttatacccatataaatcagcatccaggttggaatttaatcgctgcctcgagcaagacgtttcccgttgaatatggctcataacaccccttgtattactgtttatgtaagcagacagttttattgttcatgatgatatatttttatcttgtgcaatgtaacatcagagattttgagacacaacgtggttcccgccatatgaaaatccggccagaccaacatcattctggcgctccgaaagaagggatattcgccgccgtgaccagcctggagcgggtcgcataatctttggccgcttcgtagtcgaggaacatggcatgaaccacggcagcctggcggctgcaaattgaaaaccgccccggttcgtcctgttgttgccgcacgccccgcagaatatgtatgctctgaggacctgttttattaaggactcatccccttatgttgacccgcaaaagtatcgatacagttctgctctctgttggtgctgagaagctctcacaacgagaatgggactggatgaaaatgctcaaacccatggacccaccacctgcgatggtgacgacctccatcctgaagcgccgtggcgatacagcagcccttaccctgctacaggataccggggtttaatccatcctcatgttgtccggttttactccccgccctctgaaacgtctgttcacagccaaccagtgctggacgtccttcctggatgcgggcggtctgcgcgatatcgaggttgaagccgtcaccaaaatgctggcctgcggcacacggatactgggtgtaaaagagttcgggtgtgataacccggactgtcagcacgtaaagtacctgaccaactcatgcggcagccgtgcctgcccgtcctgcggaaagaaggccacagacctgtggacagcaacacagctgaatcgtcttcctgactgcgactgggtacatctggtcttcaccctgccggacacgctgtggccggtgttcgaaagcaaccgctggctgctgaatgacgtgtgccgtctggcggtggagaatctgctgtatgccgcccgaaaacgggggctggaacccggtatcttctgcgccatccacacgtatggccgtcgtctcaactggcatccgcatgtacatgtgtctgtaacctgtggaggtctgaataagcatggtcagtggaaaaagctgagcttcctgaaagacgcgatgcgttcacggtggatgtggaatatgcggcagctgcttctgaaagcgtggtcagaggggatggcaatgccggagtcgttgtcacatatcacgacggaatcacagtggagaagcctggtgctgaaatccggcggaaaatactggcatgtgtacatgtcgaagaagacagccggagggcggaatacggcacgctacctgggtcgttatctgaagaagccaccaatagcggcttcccgactggctcattacaacggaggggcaagcctgagcttccgttacctggaccacaaaacgggagaaacggcgacggaaacgctgacacagcgtgagctggtcgcgaggctgaaacagcacatcccggagaagttttttaagatggtgaggtacttcgggttccttgccaaccgtgtgtgtggagagaagctgccgcaggtgtaccgtgcactggggatggataaaccggaaccagtggcgaaagtgtgctatgcacaaatggtgaaacagttcctgagtcgtgacccgttcgaatgcgtgctgtgtggctgccggatggtataccgccgggccattgcggggctgaatgtatcagggctgaagaaaaacgcgcgggatatcagtctactgaggtatatgccggcctgacacaggctaagtgtgcccgggaatcggtgaaagtataaaaaacagcctgttacggtataaaaatcgaccatacagagagggaaaccaccggagtggtgggaaaagcagaaaggctcacgtggcataaggcgtggacaatggtatcgactggtttttcaatttcctatacgtcaagatacaaaccaccttttcgccatgaggcagaaagcctcaagcgccaacagcattatatattgaccaggaattaaattcccagctttcggcgtggactatacagtgtgtgattcaccacgatgaatcctttgttgatccactgtgtgacctgcgcaggttgaactccggtcagcctggcgaacgatgcctgattcccccgatagaacttgttgatgtattcaatcaaaggcattttttaattctccgaaacaacgcaaaatcatatagtaatttactatatgatttttattccgcaagtgattaactcatcggatttctttgtagttaacgaaacgttaaatttagtttgtgcctggaatggcacgcaagaagcacactagcattatcattttgatcaaaacgctatttccccccgttattggggggctttctttttgatgccgcgccagcggcatgtaaggcggcactctgttgttttatatggcacagagctaaaccgccgaagcccggcgtaagccggtactgattgataggtttcaccttacccatccccatcctgctaagccatacccgctttcagccatgaaatagcttttgtgcgcggtcggagtggtcccgacaagggtttacccgcagtcggggcgtatctccgcgttagcggaccgtcagggccgcttacgagcgtgtatttggtacttccagccagaaggctgacagcgatgagatttcttagttacaacatccattattgaaagcgatgttgttcccgccctttgggcgggggcggcggcgcttttcagtgatgggttgggcactgtggctgagtatttgcagcgtttttttgtaggagggttggaggggctttgtttttcattaggcagaagtccatatgcccgccgcgaagcggtgggaggtacttttatattctgagcggcgcggcgttagccgctgcaagcgaaggcatttttgtgattatccacagttgtttcaaagataaatattttccctgcggcgaagcaacgcaggggattaaagaacaggggttaagaatatattgcgggtttgatgttctatgtttgctgctttctgaagttattcctttgcgggtttttgtggataaccgaaggcgtttttactccgataccctattgcggccatcaaaaaactgtcagagcgggacaaaatgaaaaacggtcgtcaaatatgaggaatttcatgaaatgcaggcaacacgaaaagccccgaaggggctgaagagagtgccgattgtatcaggcagctaaactagtggggtggcgaagctgtcagagccagttcaagctgacgtagatctctggctaccagttgctctaatctttctttagtgcaccagtacgcttcgtccggcggcatacgcttcagaataaaccgcgcaatttcgtttcgctgttcatcatacggcagttttgccaggcgattagcacgtttgcgctccgctgctttcttacgtcgggacttgatggcatcgagagaacgctgcgcataccagcgtttacgagccgagtgaacagagatttcttcgccctcgcggataacgccttctttaatcaattgcagacggatttcactttctgcaaggcgcttacgttgctgctcctgaagtttcaccagatcaactcccagcattttccagccagtttcggtgatccagacgtatttcggcagtcgctggcgggattcacgatcccatatcgtcttttctgacgttcccaacgtgccaaaggaaacctgctctgccagcagacgggaaaggcgcgatactgtgactgcggtttcaggaatcacgtctcccttactgtcttttgggcttatttcttctgccaggcgggagacagacatgccgacagtgtgcaatccacgatcacaaaaactcacaagtacaacccatattgcgtcaagcagccgctgtttctccggtcggaatttatatttgcgaccgacactctgacgtttcagtacataaaatggatgcaacgacatgtgcattctgagtgtgttctgaccagtgaccgggtcttttttaacgagacgattgtaagcgtggcccaactgtccgcccagcgccttatagttgtcgggacggaaccaggctggattctcacactttggcttagtggaatgttcaccccggcgacgttttgttgttccgcctttgttttcctgggggaccaggaatgagctttcaattcccgcttcgtagtcctgccagaaacggatctgctcttccggtgatagttcagaccagtgacgtttgctaatcacagcaagctgcacttagcttgcactgtaagagttgatatttccttctcatggaattaaactccacttcaggtaacaagcatacctgaaataaataagctcaaggctctgccttgatgtcagcccccgctaatcttcgctgcctggaaaacacgagattacgggggttttctttatctgaaatttacgttcttgaacaaaatttcagcacctcgttttctgcatttacaaatcgcggaaaacttgcctgcaaatttagcagcatgggcgcaatcgatcaacgatgttcaagcctggctcgtttcctttttgattcagcacacatctctgacagcttcaaaatcgttttcagaacagctactgaagccccttctttactgacgttccccatacaaaaccttacaaaatcagaaattcagaattttgtatattcaaaaaagtttttttgactgcatacacccactcacacgatcgaataaaccacacaaacagtattatctagatttttagatcgtacatcatttaacaaacagaatattattctgctttttagatgttatctagatcattagatcgctcacgcggcattgacaggttttaaatgtcgcacacacaatactatccagatgattgtaaaaagctcgttcatcgcgttttttgtgctcattgcctggaaaatgagcactctttgacgcccgttagaacgcttgtcatctcatgctctttaacaaccccggacagcggtcattgcctaaagccctggcataaggaggttattattcgtgcatttcaagcaccgctggcatctgtcagcaacgggctacgtaacagagtgacgtgccgcgccatctacacaggtaacgactctttatccgcaaatatcattctgcatacttaaacccccttatttggtgaactcgcgttgagttaatctcactcactctctccctgagcaagtcgtacaggctgcaacgcagaagtacaccagatttgccagtctccactccaggtaagggggtttagctatgcatgatgatgaacaatcagataaagagcctgtagtgagtggctgcaacttttcataattagcttatgacgctgtattccggggatgtttctatttcagacaaacaaccgggagaaaatatggcgcgtaagttaaaaattaatcctgtcattcctgaatgtgtggcagatttgaaaggatatccactctatatcatcgttgcttattggggattaagaaataataaaacgctcacaacaacggatgttagccgtaatttccttattacacagcaacaatcttatgatgtgcttacctacatttaccaggaagcacagaagcagataacagcaactaaacgaacactatttaacgagcacaaaagaagaattagtgcgttcaggattcttgatattgacaaaggcatattgcgcaccccaaaaaaagagattgcatatgccagctacgacaatataccaactgtaacaatgaaaagtacccgttgtgagatccaagatagttttacagaactgcgccgctggatgtgttcaagaaagacaggtgatcgagtggaggtatttttgaatgtctaagtaccaaataaacgcaaccatcaaaaaaccaggtggtggccccgtgaaatggactcattacagcgacttccctatgaccgctgaagaatgcagaaaaaacttctcaaaagaaaaagaagcaggaaagtgtttttctgttgatgttcatatttcagatttcatttgcaaagaaatacatccactgtgatgaatggggagaggattaatcatgattgacgctataattacgccaatagttacatctattccgttactcttattaattttagttgcgctgatattcgttaaatctgccgtcaaaatcgtgccacaaggtaatgcctggacagtggaacgctttggtaaatatacccatacgctttcccccggtcttcacttcctgatcccggttatggaccgcataggtcaacggatcaacatgatggaaaccgtcctggatattcctaaacaggaagttatttcgaaagacaatgcaaacgtaactatcgatgctgtttgttttgtccaggtcattgatgcagcgaaggcagcttatgaagtcgataatcttgcatcagctatttcaaatcttgttatgaccaatatccgaactgtcgttggtggaatgaatctcgacgatatgctttctcaacgtgacagcatcaattctaaactgttaacggttgtcgattatgcgactgacccgtggggaattaaggtcacacgtattgaaattcgggatgttaaaccaccaaaagaactgactgaagcgatgaacgcgcaaatgaaagcggaacgaactaagcgtgcccggattcttgaagcggaaggtatccgccagtcagaaattctgaaggcagaaggggaaaaacagtctcaaatactgaaagcggaaggggaacggcaatcagcatttcttcagtccgaagcacgcgaacgtcaggcagaagcggaagctcgcgcaacaaaactggtgtcggatgcaatcgctgaaggtgatgttcagtctgttaattactttattgcgcagaaatacactgaagcactccaggcaattggcacagcatcaaacagtaaactggtgatgatgccgcttgattcaagtagcctggtgagttcggttgcaggtatcagtgaactgctaaaaaacgtatcacaggatactcccaaagttgatatgaaacaggctcaacaatatttgtcttaaaacagatagcggacggtgacaatattgttttaatcaccgtccttatattcatattcacgaatgagcaaatcattaaaatgaaaacttatgggttcatccttcttattttacatataatccctatgggggcatggttctttcttctttttattacaaacgatgagaacaaagtagaaaaaatacaaaaccacatcgtatcaatatttccattatggctgaactggggaggggtgatgatagcgatggctctactgcccctgttaatatggagttttaatggcatattcttcggcttctttctgctaatttatgcatttggcgtttataactaccttcatcttctttattcaatttctcccttttatcatggagattagccatgttatggtatacactatttcttctgtgtattgcacttgaacttataaccggaacaggatggttactcttaatcagtcttggtgcattatcaagcgccattgtgggcttttttcttccgatatcacaagaagccaatatatgcttctttgcgtcaatcagcatactggcgtcgataattaagttcttctatgacaaaaaacataagaaattagacactctcctggtgaacccagggcattcacgttttaaaggaaaagaatttacgctcagtgacgatattgttaacggcaaggggcaattactcattggtgatacattctggcctgttgagacgttacacaatgaaaactaccttgcgggaacaagagttattgttacagacatgcaaggaataactcttaaagtaatgaccatcgaagacaagagtgaaaacaaggaataaatcatgcatctttcgttgttaattccgcttacaggagcagcgatgaatgcactatgtatttttattatcagacttctggataaggattttattgaagtctacaaaaaaacgctaaaaaaaattactgcattacatattttattgatggtgttaagtgtcacaggaatagtatgaggacaattctatgcgaaacgcaaatgaaggaatttctcttgcagctattgtagctaaagaaacaacaacaggtaaatggaatggtactggtgggggtattggtttaggtactggtggtattggcttattcatcggaggtgtttctggttctaaacaagagcagacacaaagggcaaaaaactttgaatcgcctaaagaggaagaatacagtctattaaatgtatacggttcgataataaaagttctcgttttcggcgtgctatttggtttatctgcccgtttatttacatctttatcaaacactggttctgattttgctgaaccagtaacaaccaccacagccacaggaaagattcaatctattatgggtggcatggcagaaatggtaagcattttaggcaccgttgtcccttttttagtaattatcacagcaatgatctggtttctgtttttcagcagcaaacgagaaaaagaagagttaactcgagttgaacgtgaagctgctaaaacaaaactccgtatagatgtctatcaccgtttacgttacgttgaaagcgatcatgtcgtttttgacccgattacaggccgggaggttccggcagaacggacgtgtattaataaactgattgaggcacttgttgatgaaagcaacgacatctcaaaaagaaattgacgaacttctgaatgcaataaaaacaggacattcaaaattcattctatcaatacccgtacatactacccatccaatggcccataaaataatgaagccttacttcaggagaacaggaccgcttctgtattcagatagtatattcaggatttgaagaaagcatttatttatatagggcatacaaaaatgagtgcttttattaagctggcatctgttctggcgttatttattagcccggttgtggttgcaatagcaggagaacaatctcactgtacaaaaatcaacgaataccctttcatcgtcactcaatgcgacgacggaactgtgacagtggtaaatgtgataaataaccgtgtagctgtgtgccgtaaaggggaatcatgcaaagaaataaa

SEQ ID NO: 166 - DNA, 65927 bp, Artificial Sequence
  plasmid TP114tetB
attataactctggacacattacatgactcaagcaaaagctaatctgagaaaacttcgccgtgcacgttatgtcccccctcgaacagtaaagaaaagcatagcgaatacagaacgtgtcgtttcaaaagcaattaccggctgtggtgtcttccgtgatataccacaagtaaaaatcaatctcatcgaaacaaggaaaattttacaaatcgaactggctttatccattgctaacttatctgaggcgaatccaattgagatacgaaaaaaaatcaaaagcattgaccgacaattatcttcaacctcaaaaatcagaactacattatgaaaaaaaacgacgatttaatcactttaccacctcataacagccacgctctcgattacatcattaaaaaagcgtttacaccacgtaaaaccaaaacatcgacagcgacccacaacgtttatagttacaataaagaagaatccacattaaatttccaaaaaattggagaagcaatttttttcggcacagacctggtaattaagctgaagccaaatattagtgcctctggtgaactcttcatctgccagaaggactaagctatgaacattgtttcagaatttcttgagaaagtaacaaccattgttgaatccacagcggcgacgaacgccgctaaggtcgcacaggcaatatctcctacattttttgcggctatagccttatacgttatttatctaatatatgaaatcacgtatgcccaacgtgacatccttatgaacgaggtgacgaagaatatcggtgcattcgccctggttggtgcattcacttattcagcgccttattacagccagtttgttattccttttgtaatgcacgctggctccgacctttctgctgctgttactggaggttcaggaactgcaaccagtgttgataatttgtggaacgctctatctacgaatttaaacaacttccttgatacaagtatgagtatttatggaaagttccaaattgctgagaaaatgggggtttatctagtatgggggattggctatatcggcggaatgcttctcatctattacactactgttttcttgacactatcaactttcatggttggaattcttctttccgctggcattttattcatttgtttcgctctattttcatcgaccagaaatatgtttactgcatgggtcggcagttgtctcaactatatactgttaaatttattctatagcatatcatttagtttcttaattagtttcgttgaatcagttgtccctgttaatggagatataaaactatctattgtagtttactttttccttattactattatttccatattccttatagaacaagttggcacactctgttctacattaacaggtggggtaggtataaatggccttacatcagccgctaatggctttggaggtaaggttgcatctggttttatgcgagcatcaggactccgatctttcaccaatggatttgccagcaaaatgccaaatccattctttaatgcaggaagtcgttctgcatcagcattagttcagggattaaaccgtggaagtaaacttaaagcggggtgattaacatgaaagataaagtattatcatttctctttgctggaataattaccgtaacatcaccatcaatctttgcatctggtattccagtagtagacgttacagcgatagctaaaacagttgaagaagggctaaatcgtgccgctgaagcggcaagacagcttgagcaactcaagcaacaatatgaacagaccataagatacgctgaagaacagaagaaaagactcgaaggcttcactgatttcagcaatggctttgatagcgcatccagctatatgaaggattctctatcaacaataacaaatagtgcaaaatcagatcttagctctttgcgatcgcaatatgacttatcaagcaacattgcagagacgcaacaaaaatatgatgcaatcctggctaagatcaaattctatgaaaatttcaacaatgaaatgcaggaaagggctaagagattaaccacgttacagaaggagttcgcgtcagcagatactccgcaaaaaaaagctgacttatctaaccaattgaatacagaaaaattgacaatggagctacaattgaagcaatatgatattgcagagagacagctaatcgcgtctgaaaatgcaagacaagaggctgttagtcgagaaaagtttaaattaatgatgcaataggtgttcgaatgaaaaaattcataagcactttaactatcttgtcatgcttccttttagctgcttgtgaagacaaagtttatgatgtcagttactacactgaacatcttgaacaagcccaagatgttgtcgaaaaatgcagcaaaggggatatgtctggtcaaaactgcgaaaatgcgcgtgaagccattcaaaaagagcaatcgggtaaagcatttaaaaatatgatgcaataatccttcattaaaaacagctcgcaaagcgggctttttttggctgtacgcagtgaccagttgataaatagttctaatgttcgtgctgcattagaacaacgcacaaaaagaagagtacaagaagacagtgcgggatctaatggaacgtttacaatagaatcaccttccctatagcaaggtgattctatttaaaagaatacccgcctcgtgcgggtcttatcttgcttaaagatctatgaaacctccggcttcgggtattaaactataacttgctttggcaaatattgtttcattgacttcatggaatcttattttctccgcctgttcatatgttacagggaagaacacgccccctggctcattaaacatcataaaatcaccttgcattgcgttacaatgacaacaatgattcgcgtaatacttcatttttgctgttttgctatgggatggataatataattttgaatactcattaatccttgagagagcagaggttgaaattatttcaattttcgttaaatcagtccaccatactctactggttaaccaccgataaatcatatttttctttgaatcaaaatactccatacccttaggggaggatgtttcataccattcatctaatatacaatcttcccattcggcaggatcaactccccaaataacgtctctatacttataccaacgaggcaaaaaaacaccaaacacaggagttattttcttacagcgccaacatgactggtaactttccgcaatataaaaacgttgagaaaaaatattgtaatcatgttcgtttaattcttttacccactgaataaaataaattggatttttcccctgtggaacaaaccatttccgttgttcttgatcccattgcgcccctttttgtttggctaactccttttcttcaaaaggtacatttaaataaaaccgcgccataaccaacttaactccagtattctgttctgatgatgcaacaggatagatatcaaaactaaacaaagagtgcaattccgcctttaatggctcattcgtacccgcctcgtgcgggttttcttttgcctgaaatatggaggaactccatgaaatccatcattttatcgatggttgccgccaccgcattactgtcaggctgcgcggatagcaaaacacaaccagtacctgagtcaccgttaaccaaacatgaccatcagatcacgttgaaaattgataccgtgcgaacagacctgccggacagttctcctgtttgtttgaatggtatgaatatatacgaaagtctgagcgagcggcatccaggcttgtttgccaaaaatcagaacgtgattttccgtagtgcattctttgatgacggtcaggcgatatcctccgaaacaatccgcaaaataatgcagagtaccccgtgcgttgaatcacaaacaacatctgccggaagctgggaacctgccacggaactgctcccccgtcaggcaatatccggtgacactacactggctgaaaaagatcggactgctggcttcacaatgcggatagcaccggagattgagcgtggaaatttccacctgctactcacaaccactgacccgatacggaaacagactgtcgagcagaatattttactcaaaccggaccagccccttatcgtgagtggttttactggagttaatgctgatagccaaagtgagaaccggattgtcatcattacgccacacgtgcgttgattcccctgatatttaaattacccgcctcgtgcgggttttcttttgtctgaaatatggaggaacaccatgaaatccatcattttatcgatggttgccgcaagtgctatcgcactctctgcccccgtatatgcgtctgatccgtgtgcttccgttctttgtctgtacggtaaagctatcggtagcggcggcgggagcgaatgcaaaagcgccgaaaaggacttctttaatatcataaaaaagaaaaagggatctattcgctggagcaaaacctttgatgcccgaaaagcgtttcttaatcaatgcacgaccgcagaccctgcggcgatctcaaaaatcatgagtaagttcggacgttcctggggttaaccatgaaaaagctcattattattcccaccacattattgctgaatgcgtgttcccatgcccctgaacccgcacaggcaaaaggaggttggtatgaactgaataccacaattgagcaggtaagagcagacacatactataacggggtgatccttcagcagcccgtgtcacagccaaacagcactgttcaatacagcaatgataattatctcaaaaaggaaaccataaacgtaactcccgcgcctcgtattgcagaaaccgtaaaaccacgttctgagcaatcagcgacagcgccaaaaaaccagggcagcaataatagttttctgaagccgacaacaaacagcataacttcatctggtgagataaaaacagcagccaaaggagcaactaaacagcattctgaacaaccagcactctctcccgcaaagccaatcagtagcaacaaccatcaggcacaaacggcacaaaagactgatcagcagacaaaaccgcgtcctgaacaaccaccgctaatgtcaaaaagcggttttctgaaaaaaaacgctaacaacgctgttccggccaccacgcttacaggcccatcaacacctgaaaagcaaatttactttgttcgccatgatggtaaaggctcgctgcaaaaagcattaaaagaaattgtcccatcggactggacggctgaaatatccccggaggtaacgaaaactttccgtcgcacgatatcctggcagggcaacgatcaatggccttatgtcctggataaaatgcttcgcaactacggtctgacggtaattaagaacaccgaaaaaagacatcttctgattgattttcaacaacagaaagggaaaacatcacaaaaagcacctgtatctcctgacaaaacccctgcatctcctgtcaggacaccagtttcctctgacaagttacctcaaaaaccgctaacgcctgtcaccgttccgcaaaaacagacagaaaaactcacctggaatcttaaaaaaggttcgacgctgcgggatggcctcaccgaatgggcgtcaagttcaccgtgtggtaattcaacctggaatcttgtatgggatactcctgtgaactacagaatagatgctcctcttattttccggggaaactttgaatctgcattaaaagatacgctgatgctttatctttcagcagataaaccgttatacgcattcaggaatattgcacaatgcgtaatcacaattaaagacacacaacaggagtaatcgctatgggttggttcttcagcttgctcctgatattcctgtcaataggcagttactatctgacagataacaataaccaaaccatacagcgaatgaagttgcttcctgcaaaacaggaagcaattgaatttgtccatttcgcaaatgttatcaatgactatctttataaatatccagacaaacgtaattcaggaggaacgttaacatctgagcaaatcggtataacacccgtttatgatattcatcatattatttacggtaagcgagtttatatctggtctgccgatacagaaggtctgatgtctgctttgcagcagcaaacaaaacattcagcaatgttaggaagagtaaaaaataagaagattgtcgataatcaggggaatgatatgggcgttcccgttccttcctccattccagaagaggctattgtactcattaactaaatatcccctgacaaggggattctgaactggagtctgcatatccgacacatcattatgtgggccggatatatcgctacggcgcggacttcagtccagaaaatctttaccggagatacccatgcaggataatgatgatgtcagcgagcttgatattgccactcgtgaagtccttatcttacgatgcaatcttattcagcttgcttctgaatatataaaaataaatcctcttaaaaacacccgaatctacacagatttaattcatcgttcagcagatgttatcaaaaatatcgaacaaggtaacatccagaataaacataattatctgtcacaggatgtaaaacatacgcttgttttatacgacctgtacaaatcagactttgaacaatgtccgggggcaaaatcccttatacctgtcagggaaaaaattgtctcgctgaaagaacttctttccggcgctaatgagctggacagtatcgttcgtcgcccccgcaggaaaaaacgttcttcacgaatttaatatcaggagataaatcccttatgcagttatcagcggctgttctggcagcactgataagtcagtgtgcccctgatgtatcacccgatacgatgaatgccctgattatgactgaatcaggggctaatccatatgtaatagcgaatgtttctgacggaacaagtaagtattttaaagatgaaaaaggagctattgaatatgcagaaaaattaacagcagaaaataaaaggtttagtgcaggtctgacacagatatacagcaaaaatttcccatcactcaatctgactaataaaacagtttttgacccgtgtacaaatataaaagcaggagcggcagtcctgacggacaattatctgagacaaaaggagggtagtagtaatcaaaaaattctccgcgctttatctttgtattattcgggtaacgaatcaacaggatttattaaagaaaagaaatttaacaacacttcttatctggaacgggttattcgtaacgcgaataactatatcgtgccatcaatccgtgaaaaaactgatgaatcagaaataaaacccccgaatgatgaagagaaaacatcaccggactgggatgtttttggagattttagttaatgaaagtcaaatcaactttgcagtattttatcctggcgtttttcctgtcactaactgcctccgttgcctatgcaggtggactcgataccgcaacaaataccatgacagaacttaagacatgggcatttagctttggtggtgtttgtgctttgtgttacctgatctataacgtcatcatggcattcatggagaagaaaagctggtctgatgtaggaatggcgcttgtctattgttccctcgctggcggtgcactttacgccgggaactgggcgctggaactcttcaaataagtaatccatatatacaactgtgccgcatatttaccttatgtgtgaattgcggcttttttcatggtgagttatggacaaagtaaatgaacatgtcagtgagtcattcatgacttataacgggtttaaccgtcctgcgttaattgctggtatacccttaatgttgttattgttcacggcttttttcgctgttctgacaggcttccccgctattttcctttggggtataaaagggataattattcctgtcatatgtgcgctgtttctttttatagtaaaactggcctgtgaaaatgactcaaacgcactaagagtcatccgtttaaaccttatggggcttttgttaaaaatccgccacagagatttaattattggttattcatctgtcaggtaacatatatgcacaaaatcaaattaaaaaacagtgacaatatggatgttgctcgtgaatatcccgattatcgcttccatataacagacagtattatctttacttctgacaggaaaatgctggcttcacttgttgtagcaggcattccatttgagacagagaacgataatgttcttacaaatttatttaacagcgttaaaaacttcctgattgggttaggaaaggaaggcgacctgtatttatggactcatcttatcaagaaaagagcaaccatcaatggagaatggaattttgacaatgattttttaagcaggttttcaaaaaaataccttgctctgttcacatccagcgcattctataaatcaacatggtatctgacatttgggattccctacgatgatgttgataccggaatcgagcgcatgaatgaaatgacacaacaggcgcaaaaagcacttctaccatttaacgcttctttattatccgtttacaatacttatattagtgaggtggcagactatctatcactattgctaaatgcagaacataacatgattcctttatcatccacccccttatcatccagtatttgtgattctgaatggtattttggtgctgatgttcttgaactgcgtaacaacgaatcggatagtaaaaaattcgcaacgaattatattttgaaggatttcccgatagaaacaacccccggacaatgggatttccttctcaaacaaccctatgaatttattcttactcaatcctttatttttgagtcaccaacaaaaaccctgaagaatatcgattcacagttaaacaaactacaatcagctaatgatgcagccaaaatacagcaggaagaactcgaagctggtaaagaagcggtcgcagccggaattacgttgtttggttcactacactgcgcattaacggtattcggtgatacaccagatcaggccagaagcaatggtataaagctctctgctgagtttattacttcgggtaagggattccgcttcagtcgcgcctcactcgcatcaccttttgtttttttcagtcatatgccgctgaataagaggcgtccactggatacccgaagaacaattaccaacctggcctgtctgatgtcttttcacaattattcctccgggaaaaaatcaggcaatcctattggtgatggctccgccataatgcctttaaaaacggattcaggcagcgtttactggttcaatacacattacagcccaccggaaaaaaatgttaccggacaaaaaattgccggacacgcaatgtttcttggcgcaacaggcacagggaaaacaacatttgaagcaacagccagcggctttcttcaacgctttgaccctttaatgtttgttgtggattacaaccgttctaccgaactttttgtccgcgcatacggagggagctatttcacattgcaggaaggtatctataccggctgcaatccgtggcaactggcagaaggcccggaatcgcccgtctggcacagacttctcgcatttctgaaacgctggacacaggttctggcacgagacaaccagggcaacccctgttctgatgaacatggcattgaattaaacgctgccgtggaaagcattatgcgaatgcctgtcgaagaacgccggacagcccttcttctcgatatagtcagtcctgaacttcagacgcgtctcgccaaatggtgcgacaacggcgaatatgcctgggcggtggattccccccggaataccttcaatccactgcatcataaaaaagtgggatttgatacaaccgttgtcctggacacaaaaaacggtattcatcctgcctgtgaacctttactcgcggtcctgtttttctacaaagaaatcatgcaacgcggcggcaatctgatgctctccattattgaagagttctggatgccagcaaactttcccatgacacaaagcatgattaaaagcgcactgaaagcggggcgcatgaaaggtgaaatgatgtggttaacatcacagtccccggaagacgccataaactgcgcaatttttgcggcgctggtacaacaaaccgcaacgaaaattctcctgcccaatcccgatgcaaaatgggaaggatataaagaaattgggcttactgaaaaagagtttgaaaaactcaaagagctgacgaaggagtcaaggaccatgctcatcaagcaatctggctcttctgttttcgccaaaatggatttgtttggattcgatgagtttatccccgtgctttctggctctgaaactggcctgtctatttttgatgagattattgctgaaaaaggagatgtagctcctgatatctggataccagaactcctgaaacgcctgaacggttaatttctctgttttatacagaacggaaaacaatatgaaaatccccctcataattgcctccgcgctattaattagtgcatgttctcacacccccaatcctgtgcagaaaaaagggggatggtttgagttaaacacagcaattgaacagatcaaagcaggtgattattaatggaaaacacaaactattatgaacattcaaaaaaagaagccaccaaaaagaaatttgaagaaaaaaacgaaaaaaaggattatttcaaggccatacgtgactttgagcgcagtgaaattgaaatcataaagaaaaaggcaaaaacatttaccattctcgccattggtgaatttgttgtaatttgcattcttggtttcgcaatagcctcccttgctccattaaaaaccgctgtaccgttccttgtgcgagtggataacagcactggatatactgatattgcccctcaattatctgatgctaaggaaagttatcaggatgttgagactaaatatttcctgtcaaaatatctcattaactatgaagcatacgactggcagaccatccaggaacaggccgatacagtaaaaacaatgtcttcccaaaaggtgttttcagcttatgacaccatgattcgtgctgattcctcaccactgaacattctgaaaaacaactacaaaattaaggtccagattaattcagtaatccttctaaggaaggatatggcgcaggtgcgtttcaaaaaaatggtactggatttatctggtaaacccgcccccggatacagagcaacagagtggatttcgacgatttcttttgactgggataaagatatcaaaacagaaaaagagcgccttgtgaatccgctgggactgcaagttctgagctaccaacctgatccagaggttataaaatgatgcttaaacgcactactgcgatagttcttttgtcgatgctacaagtacctggtgctttagcagctatgtacggcacaccatcggaacgagacgggcgtattcagaccgtagattataacgagcaggatgtatttaatgtgcgcgtaaaagcaggcgcacaaacaacaattaagttcggacaagacgaaacaataaaagatgtcggaattggtgatccagaagcctggtcagtatcggtcagggacaacactctgtttctgcgtccaaaagcagaagaaccggatacaaacgttaccgttcagaccaataagcatatatatcctctttacctgatatcaaccacgaaacaacccacgtatattctgcgttttaattatccgaaaccaccgtcagctaccgtaatgactgaaaagccatttccatgcactgatggtggaataattaatggtcattatcaactcaagggggacaaatcaattttcccttatcaggtatgggataatggcgaatttacatgcatgagatggactaataaacaggaaattccggtcctttatcgtgttgatgccgatggaaatgaacatctggttaacggagacagaaataaaaacacaatggtttactatgacgtggctgaaaatctccgtttgcgcctgggtgatcaggttgcagatatcagaacatcatcaatcgttaatcgtccgtggaataaaaaaggtacgtcaaacggaaaaacacgagtagagaagttcagctatgaaaaataaagatgatgaaaaaaataatgacgcgggaaatcgcggaattatcgaagtaaaaggtaaagcagcaccaaaaaaaatattaatcctcatcatattactgattgccgcgttatttgtgatcattatcttgtttaaagttctgtcacgagaacaggtcgttcagcaaacacctcttgagaagtctgacgagacactggtcacaaataccaacaatggcgtttcactgacaacaatgatgaaaaacatcgaagaaaaggaaaaactcgatgccgctaaccgcaggaaagcacaggaggagcaagaacagaaacaggcagacaatgccccgtcagcgccagcatcacaaaaggccgatcaaacagccgtcaatgtgatagccaacggcactccccaaaccgccagtggagatccaaaccaaccacaaccattgccaaaatccgtccgacaactgatgggcgacacaatggtgaagatcgacaatcaggaaccaggcgaaaaaaaccaggaaagagatgatttacagggcagtcagtacgcagacggaaaggtatcccctgtgctgaaccgccgatatctgttatctgcgggaacagcattatcctgtgtgctcaaaacgaaaatcgtaacctcttatcccggtatcacaatgtgtcagttaacacgagacgtctggtcggataacggcgaagtgcttcttgcccgtaaaggagcattactgatcggggagcagaataaagtcatgacacagggagtagcccgtgtgttcgttaactggacaacgctcaaagatgaaaatgtcaatgtgcgcattggcgcacttggcactgacagtctgggtgcttccggccttcctgcatgggtcgataatcattttggtcagcgttttggtggtgcattgctgctgtcattacttggtgatggtttagatattctgaaaaacagcacgcaacaaacaggctcaaacagcaatatcacctacgaaaacacatctgacgcaacaaaagaaatggcaaaaacaacgctggacaatacgataaatattccccccacggcatatattaatcaggggactgtattgtctgttattgttccgcgaaatatcgacttttcatccgtatatgaacttcagtaattcagtaaagcaattgatatgaataacatcagagataccagtaatacatcacaaccacgagataacagtaaaaccgcaagacgatatctggatatgacgggtatccagtctgttcttaatattgaacatgtcacagaaatatctgtgaataaaccaggaacaatatggtttgaaggaaaaaatggctgggaatctaaagatgcgccagacgcgacttttgataatttaatgacacttgccaaaactctgacgaacttatcaaagataaaaataccacttagccatgataatcccattgcatcggtagttcttcccggtggggaacgtggacaaatcatcattccacctgcaacagaaaataacagcgttgtgatatctatccgtaagccatcattaacgcgctttactatagatgattatgtccgaacagggcgttttgataatgtcaggattgcgacgaaacacgaagccatcctgactgaacggcaacgctacctgtatgaattatcccggcgtccagatggtcaatctaaagctcaatttttaagagaggcagttaaagaccgtcttaattttttaatcgtcggtgggactggctccggtaagacaactatagcaaaggcaattgcagatatctttccacctgaacggcgttatataaccgttgaagatgtaccggaaatgtctctgccgctgcatccaaaccatatccggcttttctacaaaaaaaataccgttgaagcgaaggaaatcattgaagcgtgtatgcgattaaagccagatcacatctttcttgctgaacttaggggtaacgaagcatggagttatctggaggcgcttaatacagggcatgaaggctcaatcagtaccattcatgctaataatacttatgcctcattttcacgactggcaagtattgtaaaacaatctgatgttggtatgactgttgatatggacctcatcatgcgcacgataaaaacatcaattgatgtcattctttttttcaaccataccagaatgactgaactgtattacgaacccgaagaaaaaaatcgctttttgagcacaatgtaaattctggagataactatggatgcaaaaaagacggggggattaattctcttcctgttactgcttcttgtgggtgtgcttatagcctcaaactatctcggtggatacacagcattaagatattcatccgttgatatgtctttgctcaagtgggatacattccattctgtaatctcaacattttctggcaacccacaatataaaaaactcgtttttatggcatggtttggattcagcgttccattaatattctttgccatattcatgttaattgtcgtgattgggattatgcctaaaaaagtcatctacggtgacgcccggctcgcaactgatatggacctaagtaaatcaggttttttcccggataaaaaatcaccttacaaacatccaccaatactcatcggtaaaatgttcaaggggagatacaaaaaacaatttatttatttcgccggacaacaatttttaattctttatgccccgacacgttctggtaaaggggtggggattgttatccccaactgcgtaaactatccaggaagtatggtcatactggatatcaaacttgaaaactggtttttatcagccggattcaggcaaaaagaattagggcaagaatgctttctctttgcgccagccggatacgcggaaactatcgaccaggccattaaaggacagatacgctctcaccgctggaatcctcttgattgcgtcagtcgcagtgatttacttcgtgaaacggacctggcaaaaattgctgcaatccttatcccggcaagtgatgatcctatatggtctgattctgcacgaaacctttttgtcgggttaggactttacctgctggacaaggagcgttttcacctggaacagaaagccaaaggtcataatgtaccggacgttcttgtttccatcagcgccatactgaaaacgtcggttcccgatggcggcaaggatctcgccgcatggatgggacaggaaattgaaaaccgtagctggattagcgataaaacaaaatcattcttctttaagttcatgtcagcaccagatcgcacaaggggaagtatagaaacaaacttttcatcaccgctgagcatcttcagcaaccctattactgctgaggcgacgaatttcagtgattttgatatccgggatattcgtaaaaagcccatgtcaatttatcttggtctgacaccggatgctttaatcactcatgagaaaattgtaaaccttttcttctcattactggttaatgaaaactgtcgtgaactgccggaacacaacccggacctgaaataccagtgtcttattctcctggatgaatttacatcaatgggtaaatcggaggtcattgaacgcgctgttggttttacagcaggttataaccttcgctttatgttcattcttcagaatgaaggacaagggcaaaaaagcgatatgtacggtcaggaaggatggaccacattcactgaaaacagtgctgttgtgctttactatccgccgaaatcaaaaaatgctctggctaaaaagatttcagaagagattggggtgcgtgatatgaaaatatccaaacgctcaatatccagtggtggtggtaagggaggaagttcacgtacacggaatgatgatgtaatagagcgcccggttcttcttcctgaagaaattgtgtctctccgggataagaagaataaagccagaaatattgcaatccgtgaaattataaccagtgaatttagccgaccatttattgccaacaaaataatctggtttgaagaaccagagtttaaacgccgcgtggatatcgcccgtaacaatcatgttgacattccaaacctgtttacacaagaagtcatggatgaaatagcaaaaattgcagaaatttatctccctaaagctggaggaaaaaaagtcatggttgccggaggcaatgtgattactaatccagaccttgataatcacgataaaacagacgtatctgaataatcctcgcaaccagcaaatagtattttgcatattccataaggtaattaaacatgaataaaaaattgctttgtttattaatatcctcttttttattatcaggctgtgcaaacttcaaaaaaatcaatgctaatgaacttgctgccgaaagagacgcacaaaaagcgactgaatacgcgaaaaaaattcgtaataacccggttatccaggattcaacaaaacaatggattaatacaacgccaattattgaaaagcaggtaaagcaatcagcgccgccctgcccgattgtgattaatactcgttcagatattgagctacgccagatcgcacaacgcatcacacaaacctgtcatatcccggtacgaatcagcgccgatgtctggacctatctgaacggtacaggcactggctcaacacaacaaatgacaggctcaattccagcacctgatgcaaatggaatggttcctctggcgtcagtaggcagtcagccagtaaaagtctcttctggcggtacatcactccctgaactgaatatctccgggcttcctgccctactgcaaaccgtatcttcacggctgggaatatcctggaaatacgataaaggtcgtatcacattcttctatctggaaacgcgctcattcccgattacatatatggacagcaatgtggcatacaactcaaaagttgtgagcggcacaatgtcttccagtggcagtaccggctctacaagttctggcggtatgactggcgacgcatcaaatacgcaaactacaaccgtggaaatgaaatcatcgctgtacaacgacctgaaaagcgaagtttcctcaatgctgacaccaggtacagggcgcatgtatctgtccacaggttcactgacagtaacagataccccggatgtactggacagcgttcaggagattgtgaacaagcgcaataatgaaatgagtcgtcaggttgtgctgaacgttgaaatcctgagtatcaagaaatcaagccaggaacaggcgggaatcgactggaacgcagtatttaatgatggtcatcttggtctgagtcttggtggctcatttggtgatgccgccgagaatgttattaccagtggtgtatccatcgtggacggtaagctggctggctcaaaagcatttctgaaagccctgtcgtcacaaggcagcgtcagtgtcgtaacgcaaaactccgctgtgactaaaaacctgacgcctgtccctatgcaaattgccaatcagcagggcttcattgaaagtgtcacaaccgattctaccgccaatgtgggatcatccacgtcactgaatgcggcaacaataacaaccggattcaatatgactctgcttccatacattcagccggattcacaaaacctgcaattgctgttctcaatgagtctgtctgacaaacctacttttgaggtgttcgaaagtggcggcagtaaagcacaaacaccgaatgtggatttgaaaacaattaatcagactattgatctgaaatcaggccagacagtcattctgagtggattccagcaatcaaaccggaaaaccagtaagcaaggtgtaataaccccctccttctttggacttgggggtggcgttaacagcgaagacggcgacacgattctggtcgttttgattacaccaaatgtgcttaattccggctccagtgcagtaataaaaaatgtgaactaattaactgaaaactccctgaaaaaacacagggagtttttttggaggtcactttgtctgagaataatcagaataaccagaatttcacttcggttattaaaaacaagcgtgcttttttctccggtctggactggaaaacgcttccttcagaagaaaagaatgcgcgtacattcgcaagaaaaaacgacgctgaatattttctctcctgtcagtatcaggattcagaaaatgaaaccaaaacgatggtggcatttatcagaaaagaggatcttcccacaggggcgtcctcattctggtcactggcactgatgataaaacccctcatcgaacctgacggatacgctatctgcgaactcggtgatctttatggctttgtttcctgcgtcaataacgttctcgtcaacgatgttgtaggtaacaaaagtcagatcatgagtgctctgacaacatttcttgagtttaatgaaacaccagaacccggctggaaactataccagcctgaatcatgggatatcagccaggcactcccctcactcactctgtctgcgttgattgacgtaaaaaaaccgccgaaagaggcggcgtttactcgcgtatcccgaaaacgtcagttcatgatttatggcggaagtgccattctggccatactgctctggaacgggatcaccatgtaccaggaataccgggaaaaagaagctgcggcagaagctgcacgtcttcgtctggcaaaagaaatggcagacaaacaggcaatacagattgccccaccgtggcaacatttacctgaaataaaaccatttattgataaatgcattgataaatgggatgcactgcccttatcgatcgccggatggcgttttgaccttgctgaatgcagcacatccggtaatgacgggctgttacgcacatcatataaggaactgagcggcgttacggtcgaggacttcagcacacggatacgagaaatattccaggggacaaccacagcaacttttgtattgccagaaggcagcgccgggggattttctcttcctgtcagttttgacgtttcgcctgatccaattaccccggacacattgccacaggcaacagatattcaggaacgcctgacaacatttgcacaaaaaatgaggttaaaactcacctggcaggaaattgaaaacacaaaaacagatgaagaaggccgtccaataattctcccgtggaacgagtatgaattaatgattcagaccagcaccccgccttcaatacttttcgctaactttcatgaacctgccgttcgcttccagtatgcaggaataaaactggaagaaggaagactgaattatgagattaaaggtgcattctatgttaaaaataattaaaccaacgattatttctgtctgttttttcagttcacttgcttacgcaacagaatctgaaagcacaccaaaagacgaaataaaatattcatctccgaccattttacaggtagagcagattcaggctgaaacggtaatttacgaagcaaagctggcgcgtcagaaggctgtcagtgaattgcgtaatcttgatttgaatggtgtagcgtccgcaacgccagcaataacgccctcttccgggtattcttctcttgcagataccgatataccagcgcaacgtgtagccgctaaatcacttcgtgttattgaaatatttggtacaccacaacaaatgtcagcacgaatttctctcctggacgggtcagtaactgatgtcaaggtcgggcaaagtattcctggtacttcttataaggtggcatcaatcactggtaatggcgtctggattcagaatggtacagagaaacgccagcttattctttaatgctattgaaagagacgacacataatgtttttttctgacgcagactatcccggaaaagatatttctgatgttgtatacgtcagtatatctgaaaaagacgataaacctgttcaggtttatatcgctgataacagtaaaggacagcgtgctgttcaggcttatattggcactctgaatgttaaatatcccggacaggtaaatataacctcgacaactcttgatgttatcgcatcccgctaccaggacagcgaaaaaaggtctgattcaaactcatcacaacacttaaacagcaaccaggaaaaggtcattagctacctggcgaaagcaaacaaactgggaagttccgatttgcacatcacacctggtcgggacggctccgagttcacttatgtcgaagcacgcgtgcatggggaactggaaattctggatgtcatcccgcgtaaagaagggctggaattgctgggtgctgcctattctggaatgagtgatgttatcaaaggtacgcagtttgaccctgcaataccacaggatgcacgtatcgcagagaattttctgaagcctgtaaatctttttggggcgcgctattcgcattatccgtgcgtgggtggtgtgtacgcggtcttccgcctgattaaagatgacagcgaggatattcccactttcgaagaacttggctacatgccgcaacaaatccagacaatcaggcgaatgttacaacgcccggaaggaattatcgttttatccggccctacagggtccggtaagtcaacgactctgagaacggcttcagaagcctatctgagcacgtttggtttcaaccataacgataatatgcgtctcccccgaaaacgccttttcaccattgaatcaccgccggagggccgcattcccggcgcaatacagacggcagtcagggattccgtcgatggctgggttgacgcgattaaatccgctatgcgacttgatccagacgcgatactgaacggcgaaattcgtgatcacgcatcggcattagcagcaatcaaagcctcgatgacaggccaccttctgttgacgaccttacacgccaacgatgccctgaatattattgagcgccttgaaatggagaatattcaggccaggctgattgcagatcctcttctgtttatcggtctgctgagtcaacggctggtacaaaaactctgtccttactgtaagcgcacttatgctgaaatggcagacaaactgagtacagaagaacggaaactcattgaggaaaattgcctgccggaacaggtccggttgcgcaatcttgacggttgcgagcactgttataaaggcgtaacgggaaggacggttatagcagaagtcgtctcacccgacgcacgtttttttcagttatatcgtcagtccgggcgtctggaagcaaaatcatactggcactatgaacttggaggaattacccgtaatcagcacttattacacctgattaatcatggcctggtagatccgctgtccgcacacttcatatcccccattgacgaagataaatactcaatgctcccggaggggacatggcgataaaagatatatttgagaaactcaattcgatagaaattgatttctctggaatatcccactggctggcaaaatacacattcaggtattccagaataagtttatatgaagatttatctggaatgttaaatgatggcataaatgtaaagcgtgctcttacacacctgattgatgtagaaacagactacgggaagaaaacggggtcttctgcaacctactatatttgttgtgagtgccttaatgcactgaataacacaggggctatatcttcagcattaaaaaaatatataaaggaggatgaatatcaattaatatccagcggtgaaattcgcggcgaccttgccggaggattagttcaggccataaaaattgtcagaagtcgttctgaaatgacaatgactcttgttatgtcgatgatttatccatccgtactggtttttggttgtctggcaaacatgtatatggtccacgataccataacacctgttttcctttctctcgcaccgaaagaacgctggacaagttctatgcgattactgacagatacgtctggtttcctgatagaaaacggaacgtatattctctgcttctgcatcgtactgtttttcctgatcagatattcgcttgcgcgttatacaggaccgggccgtcagtatcttgattacattcccccctggtcactttataaaacatttaatggtgtaagttttctcttcaacatggcctccatgttaagtattgatattcccgttgcaaaagcactggaaaggctggagaaaaacagcactcaaaacagatggctactcgaacgaataaaagaaatcaggagatatgttttacttggacagtcacttgcaatggcaatgaaaagttgcggttatgacttcccatcgaaattatgcattaacaaactattacttcattctgaaaatgctgacaatgcattgatgatgtctaactatgctgataaatggctggaggaagcaaaaggaaaagtcaaatcaacaggagtctggataactgtagtatccgcattaattgttttcgcatttattgtaatgatgattactgctctctacgatgtcagtaacgtcctgcaacactaatccctaatatttttaacctctcaataaataaggaattatttattatgtcttctattaatattttaaatatgcgttctgttttttcttctctttctgcacgccgtaaaaaagaacaggacaaaggggcaacactgatggaagtgttattggttgttggtgttattgttgtacttgcagcaagtgcatataaactctattcaatggtgcaatccaacattcaatcatccaatgaacaaaacaatgtcctgacagtgattgccaacatgaaatcactgaaattccaggggcgttatactgacagtaactatattaagactctctacgcgcaaggattactgccatccgatatgatcgcagatacaactggcgcaagcgcgaaaaacccgtggggcggctccgttacaatcacaacctcttcggataaatactccttcaatgttgttgaggccagcgtaccgaagaaaaactgcatggcaatggtaaacgccctgcgttcttccagcgcaatctccaagattaacaacacttccacatcaactgtcgatgcggcaactgtttgctcatctgacagcaatacgctgaccttcagcactgattcctgatttttcatgtgcatcggataagcgccttcgggcgcttattttttccatgtttacaggaggagtattgtgcgttctgttctttatatcctgctatcatgtatttcatcattaatcttttcattgcaacccgcatattcagcgacaacgacccaatttgatgcctgctttgcacaagccgggcaacgttatctgattgatcccctgcttctgaaaagcattgccactgtagaaagttcactcataccagaccggataaatcacaacaaagaaaaaggaaaaatattaagcaccgattacggactgatgcaaattaattcatcacacatccccaacctgaaaaaacttggcgtaataaaagacaaatcagagcttattgataacccctgtctcaatatacaaattggcgcgtggattctggcaacacattttcagaaatgtggcataaactggagttgtcttggcagttataacgctggtttcaaagaaagtaacgaacagaaaagaatcaaatacgcacgctatgtctacaataaatacatggtaaggtaacttatgctaaacagcatatttaatacggcgatactttgctgtgcaaatatcgtctgtcaatgctacgcctacaatgaagtaaaattccgtttaaataaacttaatgtatcttataaaaccggcacagagaaatattactgtctgatactgacaacgcttgccgttctgtatctttcattaaaccagctatcactgattcaatctataatagtgattgttttctatgctttccttacattaatggcttgtatagaccttctttcatttctactaccacgcctttataccgtgacatttatcttctctggcctgttatatcagacatggaataacaatatattgtctggtttgttttgtgcaatgctgatgttcttcattatgctgtttgtaagactttactttgcatataaaaacggaacggaaagtttcggcatgggagatgtgctacttattgcaggaactggcgtatggtttccaacgcctgagattgcctgttcaattgtatttattgccgttatcggcggaattattttcttcactcttggcggattaaacaagcaaaaaaaatatatcccattcggtccgttcctttgtggcggaatgtttgtttactcactcgtaccgggaatattattctgaggattaagagcaatgaaaaagacagataaaggtgtatctcttcttgaggtattacttgtcatcggcataatggtgatggttatccctaaagtttatgaaaacattgaaaaccatctgaataatgttcgctggcagaatgcagcagaacacgcaaatacctataacaccgctgttcgtaattatgttgctgacaatgcatcaacactacttgctggctctttacccaaaacaatcacgccagcaacactcattcagaaaggctatctgaaatctggtttttctgaatccaattttggacaaagctacattaccggtattgcaaagaacagcaaaacatcccgtctggaagccctgacctgtagtaatggcggtcagtccctgtcagaagccggaatgcgctcggtagcaagcatgattgaagggcttggcggctacatcaacagcagcaagcaggcgattggcgcgggtggcggctggtctgacacgccttcaaattacgggctgaactgcgcgaccgggcatattgcaatggcacttgttggcgctgatttgcaggaaagcgaccgtttgtatcgttactccataaccaatcgtcccgaccttaacaggatgcatacggcgattgatatgaacagcaacaatctgaacaacgtcggcactttaaacggcaacgccgccgcgctctccggcgatatcagcgcacgtaacggtacgttctctggcgcaatttcaggaaatacagccacaaccaacggcgatatcacttcgaataatggctggctggtcacaaaaaacagcaaaggctggatgaacagtacctatggtggcggctggtatatgtccgattcgtcctggttgcgcagcgtgaataataaagggatttatactggcggccaggtaaaaggtggaactgtacgcgctgatggacgcctctatacaggcgagtatttacagcttgaaaaaacagcaacggctggcgcttcctgctcccctaacgggcttgtaggccgcgacagtacaggggcgatactttcgtgccaatccggtcggtggtctggtggcaataaagtgaactactccgcctgtaagtggtatcaatcatctgtagcaatgaatcacttcattggcgggaaaagtggaggatctatctactacaaacccattcaatgcccgaccggatttatcatgacaggtacacgcatgtatggcattggtgatggcgttgatgaggaacacgttgatgcttattgttgccccttcggttaaatcccagcaccaggaagattcaggcatgtaacagtaattgtgccgccggactcataatttccccacgcataattattcacataccaaaccttgttttggtcggagtatacctgctgaaacccaccaaaaggcgcaccattaaggtatgtccacgaacagtacgcatgtacgccaatgctcagatttcgggtgtttttcccgatattgtacgtactggtagtgaagttcacttttgccgttgtccagataccggattggcactggcccccgtgccaatccggtacgtggagaagggcatcaggtagcactgttctgacaggaaaaatagcaaatggacaacagatcccattgccatctggtttttctgccagccagtgtacctggagtgtcagtaatgcagaaaatccgcacgggtggaagccgaattattttgcggggtcagttgcaacctatgatgccaatcgaattgtgaaatgcggcttctatgacgaatacaacttttatggcggtactcaccgaactgacctgtcggggaaatgtagttacatcgtggtttgccagtgataagtatcgtcactggcaaatggcgtaaactgtaattgaaccattttgatcttcggtcgtgtcgcaactggcagtccatgcattgttgcctgaaggcatggaacgcgtgagccatataaatccggtatttgatctgcattgaccgcctccaccaatgactttcttgccagatggacatgttgccgttgctccaggccaacgccacgcagtagctgaagcggtaacaatttggctatcacctgcgccaatttttttccacgtaccggattggcacggaggccagtgccaatccggtgtgtggagggcattaggtggaaagctcaaggttactcaactttccagcactggttacttggggcaatttgacttttgtgccattgccagaatgggaaatgctgaggattctcattactgccaggtagtcgagagtccatctggttcacgaaaatggtacaaatacgagcacaagacaggttgtattgcgtcctgtgtaactctcaattaagtttggtatccaaaaactgaaaatacccctgagccacaagagtagttttgggccggataagaggtgatctgataagttgcgccagcagggacagcaaaagagatgaatgctgtcttcccataagatgggttgttgctcgcatttgtgctaatcaatacccctgcaacgtatccctgcaatctggatgtgttagcgcaatctcccccggcggaaccaccattccctccagaggcgtaaacaaacagcgtaccacttcctgtattgcgaccagtaaatgatcctctgtgtgagccaagattactgtaactaccgttagaggaaccggaagttctccacacaccggattggcacggtgatattgcatttcgaagcaagaatctctaccttccccccttttttgtctggaggggatatgtttcagaaaatcaaaattcgcaaaatgacaatcagccgggcgctggacaaatacctgaagacagtatccatccacaaaaaaggccatctacaggagttttatcgcgtaaatgtgattaaacgtcaccctattgctgaacgctatatggatgacattaccactgttgatattgccaattatcgggatcaacggttggcgcaaattaacccacgaacggggcgtcaaataaccggaaacaccgtccgtcttgaacttgccctgttgtcatcattattcaatatcgcccgtgtggaatggggaacatgccgcatgaatcctgtcgaactggtcagaaaacccaaaatcagtagcgggcgcgatcgtcgcctgacttcaggagaagaacgccgactttcgcggtatttcaaagaaaaaaatcaggctctttacgtcatttttcatctggcgctggaaacagcaatgcgacaaggtgaaatcttgtcattgcgttgggaacacgtcgatctgcaacatggggtagctcatcttccaacaaccaaaaacggtgctccacgcgatgttccgctatccaggaaagcccgtaattacctgcaaatgctgccgacacagcttaacggtaatattttttcttatacctcttcgggattcaaaagtgcctggcgaacagcacttcaggaactgaagatagaaaacttgcattttcatgacctccgtcatgaggctatcagccgatttttcgaacttggtacattgaacgtcattgaggttgccgctatttcaggccatcgctccctgaacatgttgaaacgatacacacaccttcgggcttatcaacttgtcagtaaactcgatgcccgacgcaagcaaaccagcaaaatcgctccctattttgttccctacccggcaacggtcgagaacagaaacgggcaagtcgttgtgactctgagtgatttcgacctggaaacaagcgcagccacaaaagaacaggccatatttcatgccagcgtgttgctgctacgaacactggcacaagccgcccagcgaggagaacgcgtccctactcctggcgaacttcctacaaacattgatgaacgggtaatgatttgtccattaacaaattagaggattcacttatgatagaacaactacagagtgattttttattctggatatttatttacttcctgatagtaggtttgcttatcagaaacattcatcttaccagaaaaattaaatccatcgaaaaaaacaaaatgttcccagcggaggaatatgctgtcctggacattgaacagcatatgtccaataaatatattgggcggctagtaacccgttttatgaagagaactaatggtgcacctttgttaattgtgtttccagaatacgataaaggagacaacaatgaagacaaaaattctccaccattccaacttgtaaaactaacatccaacatcaacaatattaaagaaatttattccaatgatgacttaaactgttttctgaataatatttcggcacaaaaaaatttatatacaacgcactctggacctagccaggcatggattgaacatgcatatcctttgcaacaagtaactattctcttacaaggcactcgtcatagtgaaagggaagatataatcagtcaacttgagattattctttccagactaaaaaatggagaaaatacaggttttgagcatgacgatgattttggatattcatttcagtatgatgccgcagcagtaggaaaatcatcatttttcgatgaagcggcaggaagaaaataagaataacgctctatccattgcacagacaaattaacgttaatcttttatgaaaatcttattaacaatatttatttatctgcttaccgcttttcagtctgcaaatgcaggtggaataccttatacatttaaccagaaaattcttcaggggaaagttattcgcgttctcgatggcgacaccatagaaattaaaacactacccgcaaaaattgttgtgtatgaagttccgatccgagtccgattgataaacatcgatgcccctgaaaagaaacaaccttttggacgctggtcaactagtcagcttaaaactctggttgcaggtaaacaggtgacagtctcttattcacataaagaccgctacggacgcattatcggtcatgtgttcacgacgaacggcacggatgccagccgctttatggttcagtctggcgctgcatgggtatatgaacgttacaacgtggatgagtcattaccggctctgcaacgggaagcgcaggaacaaaaacgtggtttgtgggccgatgcaaatccggttccaccgtgggaatggcgtatcagaaattaagggggcaagaaaatgcattcttcttttggtttgccatgattctgtctttttatctttgtgcaatattaaaggcttctttttaacagggggcggcatgtatgtaattaatcaacagacaagggacaataatattcttacgttgcatgatgtttttaaaatctatcaaaatacaggggggcttcgtcttgtaaaaacagaggagaatgaaaagtacatctccattatcatttgtggcgtttttcgtattagaaaaaacaaaaagaataacaaaatcactttgtggggatacaagctaagagataagcacactggggtatggaccagaagaaattcatttcctggtaagatttttttattctggtctaaaaaatctgcatacgacatggacgactggttaaaatatgcgattagctacatcatcaaatcattgattgaggctggatattcaattgaagacaaactctatttgttacgcattggagaggaagaggaaaacagcgagagtcgttatatttccacactatatccatccaatgtatattactcatatgagtatggaatacatgacattgttcattgccttggtaaaatagcatcattcaactacccctataatacacgatatatcagcagacatattttactcgcagagataaaaaacaaaatttatcagagagcattaaaaattataggggtggataatgaatttaatgcttcaaaagcattgagtaaagctatatggataatggtagataaaaagatatttgcacaatatgccagagcttcacattgttcgatagcttacaattcaattcgtcaggcattatttgaggactatctggatttttcaaagcgaatccatattgtgaatgatatggattttttcggattgtggcctatggttggtcgtctaagacaacaacataaaaatggtcagtttatactatctggaaagacaaaagagttatatgaaaaaatcagttttccctgcaaacttagttatggtgagttcagaagtttacgacatgttagtttgtcattagtatatgctttaaatgataaacatgataatgcatcattcagatttacagtcagattattacgccatccacttatcaagaactatcctgtgagagcaatttactggattatcgattatattagcattcgagcttactcagaaaaagaaaatgatatttatcgtatatgctcaaaatggctagaatatcatcgtgatttatttaaaaacattggcttttatgaccgtaatactgaatccaggcaaacatcacgctgggaaatggaaacgaatcagttgtgtcatgcaattgactggttgttagcagaagaacggttaattcataaaaaccaggagtggccttctttctggagactatctgatgaatggacgcgacaagtgaagaataacgttattcccgtaatcccaaaatggaaaggaactgggataaactggcagaaagttgataacggtgtaaatgaattaattacatttgatgctctgtgtcaggaaggtcaggagatggaacattgcgttgccagttatgcagactggtgtgcatctggagaatatattgcaatttcagtcctgatggataatgaaagagccactcttggactttcacgaaaagaacatgatttaacctatcagtttgaccagatgagaggtattcgtaatcaggctgtttccagaaacatgctaattaaaggcaggcatattttaaaaataatcaactcatcactaaaaagataatgagtcatcgcatctcattacagcaccgatgactgggtgtttattctttctgaatacaaaaactgactgaaagataaggaaagaaagttttcttacctgtttgtcttacgcaatggtgaactggttcaccatgaggtcaacaaatcagagcttctttgagaggtttaacatgcaatatgcattgcttgatggatttgaacgaaagtttttgctggatgctcttgaattcggtgttctgaaggactggaaagaaaatccggtaaaagaacttcctgatattgatgaatctgctcaccccttccatgtctgttatggtggatatttattaaatcctggtgtttcagattcagatattagcagaaaaataaaagaccagacaggattctggctggcagctattgatgatacccgcatggattgtcattcaatagcttattatgatattcacacactccctctgatttcgtgtggtcatcaaaagatagttccttttgccgcgttaataaaagctgatgaatgcatcatttcaaaaatttcttcgtattctggttttgccgtaacagcctttttgagaattaaagaccaggatattgcaactaatatacttaaccgtgaggggatttttgcttttaatggctgtgaacgcagattcagacatccagtaagtgaagataactggcaacaggcagtatcagaagaacgtgctatccgttgtgccaaaagattaattcaatgtaaaggataacaaaatgaaactttttatcgcagaaaaacccgcagtagcgaatgatattgttaaggcgcttggtggcaattttacccgtcatgatggctggtttgaaagtgataatactattgtgactaactgttttggtcatattatcgaatcacagccccccgaaaactataatcctgaatacaaagagtggaagattgaaacactccctttgcgtctttatcccgtaaaataccagcctgtagaaagcgccgaaaaacaggttaaaacgattattgagcttatcaggcgtgctgatgtgaccgaaattattcatgctggcgatcctgatgacgaaggacagctacttgtcgatgaggtcctggaatatgcaggcaacacaaaacccgttaagcgcgttctgatcaacgacaacacccttccggctgtgaaaaaggcgctggcaaatcccaaaaataaccgtgacttcagaggactctatctcaaggctctggcgcgttctgtagccgacgcgatatacggtttatccatgacgcgtgcttacacaatcccggcaaaaactaaaggctataaaggtgttttgtctgtcggacgggtccagacacccgtgcttggcctgattgtaaatcgcacccgtgccaataaaaatcataaatccagcttctactacaccatgaccggacattttcaacgcggcgctgatgttatcagggcgaactggaaacctggtgagttcgcaccgctgacagaccgcaaattgcttgataaaacctgggcgaatggaacagcaacatcacttgcaggaaaaccagccacagttgaagcggcagcaacagatgataaaaaaacggctgcaccgttgccctttaacctggtacgacttcagcagtacatgaacaaaaaattcaaaatgactgctcaaaaaacgctggatatcacacagcagctacgcgaaaaatacaaagcaattacttacaaccgttcagattgttcatatctttcagacgaacaattcagtgaagcaccacaaataatcgatgccctgaagtcggtgtttgatcagccaatggatattgatacgacacgtaaaagcaaggcatttaacagcgcaaaagtaacagcgcatacagccatcatcccaaccgttagcgtaccggacgtaaacgcactgagcaccgacgaacgcaacgtttacctggcaattgcacaacactatcttgtccagttcatgcctgaaaaggcatatcaggaagtatccgtcgccattcagtgtggtgatgagtcgttttatgcccgtgccaggaaaactacagacagcggatttgaagcgtttcttggtgtggaaaatgccggggacgatgaagcagaagtcgaaaatgatgattccgcttttgatcttctctgtaaaattcgcacaggagaaacagtgacgacaaaagaagtggttgtgaatgagaagaaaacaacgccaccgccattattcaccgaagccactttacttgccgcgcttgttcgtgtcgcagattttgtcactgatccagtgattaaaaagttactgaaggataaagatcgggataaaaaagacgaacatggcggtattggtacgccagctacgcgggcttccatattggaaacactgaaaaaacggaactatatcaccctggaaaaaggaaaacttattccgacagataccgggtatgcgcttattgatgctctgccggatatagctgttaatccagatatgacggcattatgggcggaaaaacagacactcattgaaaacggagaaatgaccatcgaacagttcgttgacgaactgtacaatgatctgataccgatgatcagtaatgcgaacagtgctgaaataaaagtttcccccagcgcgccgtctggtcagtcacaacgcctgtcctctccttgtccttcctgtggtaaacagattgttatcaggccaaaaagctattcctgtacaggatgtgaatttaagatatggaaagatttctgcggcaaatcattaaccgataaacaaattgaaacgttaataacaaaaggagttacaagtgaattgaaaggtttcattagtcaaaaaacaaacaaagaattttcagcaaaagtaaaactggttgacaaagcaaccgggaaactgggatttgagtttacacaaaaaagtaagaaataaatccagcagtagaaatcaaacatcgttgtagctactataggacaaggatgttcttcaggaattgtacaatgaaaacaaaacaagactggctctttcagttaagacgttgctcaacactcgacacacttgaaaagattattgaaaaaaaccaaaacagcctccccccttctgagcttgagtcgtttaatgccgccgccgatcacaggcttgcggaactcacaatgaataaactctacgataaagtccctccatccgtctggaaatatgtatattagttttcatctattaatattagatgtttgatcgacacaaacatcagcaatccctatacacctttcatagaatgaattgaaccctgtatatagcctgtctgaaatggatatctggcaggctatcttaatagtgttataggtggtatgaatgtttttcctctacgagacctacaatttcttctactacctgataaagttaattgtcattcagccacaatatatttgtgtctatatgatattcttttttttcaatgcagggatagcatatagcatcaccaatgatatcgaggatcaagtatgtcgatggcttttattcgtaagtatgttacatgctctgatgattccccccgcagttatcatgccacttatcatgccaccacaggaaatacttcaggaaacagagaaaaggcaggaactacatgaatcaatacccaaaacatgcaaattaaaggcactggatgctcaacaaggtggtttattcggcgttgataaagatgaatgggtattccctgacaataaatcattctatctgcctgaaaagtaccgtccagaaaacaggattacggaactagccatgatgaaagaaggataaagacctatgaagatattcaaattgtttgttctttgtatcccccttctgtttagtctttttttcgctggctacggcattttgtcaaaaaatccatttgaaacactaccgtgtctgtccgccagtgctttttgcctttttctgtttgacatactgaggcgatcatttatgaagtgaggtgtcttgatgttaacgttgaggttgagaaagttttgttggttcttataattatagaccggattaaatcatgaaagaatacgaaaaaacggctttaatatattccttaaaggaaagcaatacattagttcttcggattatactaatctctattttagttgtcggggtgatttcaggcgcgatatacttatataacttggcgatctcgttgtttgattcaaacccaacgtctgtgcaattcaccttttgcggagtaggctgttttattgctctattacttcaatggatatctaatgttgatgcaaattacagagaaagaattggggagcaaccaagtacaataaaaaacattgtacaatatttatttgcagccattattaccattagtttcattacaatggcattaacagccatattagtcttaaaagactcgtccaacatatggctcaacattacttttattgcattattactgtccatttttgtagctattatttctgtttggggttgactttttttcttaaaaagcccgaaaaccgggcttttttcttaattagtgcatgtcctgtgaatcgtcacgctgctgctgcgattcctgatgatcttctctggcctggacaaattgttttccaagagcatcttctgccatttcacgagtgaatccgtgattaagcaaatcggattcggccttctccctttcgaacttcagtccttcccctctgaacttgtcctcaaagcgatcaattgcctcaagaatcttgccgtcttccggcgtgcaatcccgtccctgtgctttctcaatttcatgacgctccacgcgttcagcatttttcattacagcgtcaatcccctgagaaatatgttcagactcgacgcgataaatgacagtatcgcgcttattgagatcatgtagctcgcattcaacccggccccactcaatagcatccttgagagagctgaaatcttttatttcagcattcagaccttcatgtgttgagaaatagacataatccttctgttgttccagtttattcacattttcaatagcccttgtactgaaatggatacctgtaattaccggaacacgagccgatgtttggtcccccgttaaaacttcagaaggtgtttttccagtgatcgcggcaaattgctgctccgtaacatccactctggcaactgcatcaccacgctctaagccatgcttaccagcgaccgcaaggcgataaagaccaccttcccccctggtaatttccgcctccacaacgatatccccattgcaggaactgaactgagaacggtctttaaccaggaagttttcaagcccggagatcatatgctcgttagctgaaatactggcgagtatctcttctggtgattctctggacgaatcccccgcctgttccatcactgccatattagcgtcattaacagcgtccttaattcctttaaaggcgatttcttctcttgttacaggtgtgattaagatatcatcctggttaagcccgtgctcctgaagcatcttatttttatattcagatgcgtcgtgcaatgactcaaaagtcttaatatcttcactaaactcatccttcgaaaaagaaaccgcatacactggagtacggtattcttcatatgaattggcaattatttcaaatggcctatcaaacgttactaatgccccctctggataagaggataattcatcggttgagacagttttagacataagcacaacagtatcaaaaccatcaccatttaaataattgctttcatatttttctattgcagaagatttgctttcctcataacactgaatagccgcatctttagaatgaaagacgataccttcattcaaatcatggaagcgactaaagtttatacaataaatttcctgtttattatgcacctgcgcagtagcctgatcgtgttgagtagtaagctgctcctgaatcagagcctgtgttctgtcaatacctaactcattcacaattttgcaaaattcttttgcgtcgttttcattatcaaaactggcaacgtcaaaaatatcatcgctgtctccaggtacatgtcccagcacttcccaaatctcattttcatcgctatccagagatttcaaatagccaaattcaccatttgtgcctttactaagcatctgtgaatccagggtgtttgccctggtaataacaccaggatcatatgaagatgtggcctgctctgcgacctgtgcttgctccgcgacctgtgctttctccgcgacctgtgcttgctccgcgacttgtgcttgctcggtggcctgtgcttgctctgtggtctgtgcctgttcggtggcctgttccttcaatgcatcacctttctctattctggattcggactcctggctattttcctgtgtttccacctgctcaaacttattaccctgaagttctgcttttaattccagcatcatctgttgatactgctccgggcgtaaaataatcttcatgtcctgctctgcggcaacttcagcgcacatttttttgaaatcttcagagccggtaagtttgagtacaccaccaaacttttccctggaatactcaagcattattccgatctcttcttttgagggatttttacccgcaacgacaaagttccctttgtcggtaaagacaggcttttccgattcctgatcgcgataaacaatcctggaatcctgcttatccatcacaagatcttttagtttggtgttaacctttttcgcctcttctaagcggcgctgggaatccaccgctttctgaagcgaaagttcgggttcgtcagcagaaatggcgttgatttcatcgaagttgagatagcttttgagacgttcaagggctttcatttcatctttatccttatgccagtcagcatgatattgacgaataatgtgtcgcccatctgtgtcgagttcagaaagacgctcaagtgtggttagttttttgtaaacaatcacacccacggcaatatcacgctgttcacgtggtattaacttcaactcgcgtctcatctctcgcagatcattatacagcttgccacgctcaaacctgatagtatttcgtaatgttttttcagataaattcagtgagttaagacgctcacgagcttcatgatgcgtaaggcgtctgtaggttggatagcgcgtatatggcgtgttttctaactgctgtgaataaacttcaagcagaaaggatttcgcatctttccaggcaagattaatatgctttgtcagaaaatcagatgcgttcatattacgattccccacagaaaaccggggggaaccgtcctttgctgttctgattttatgctgcgctggaataatattaaaacgctcggcggcagaagacagaaacctgacaggatcaatatttctgcgaatttctgccatcgttgtaatttcgtttttctctgccgcctcattcagagtctgaaacatcgtttcacacaaaaaagaagagcgttcaagactttttattcctgactctgtgaattgtctatcataatcccgtcgcacatcctgaccaggatgttctctttgcggtaattgctctgccagatcacgctgcgaaatatctgacaatacactgatagagtcgggtcttgtgaatccattgattccgtaaaccataccgcgttggggcatacgtgacaatccgactgttgcttcagattgacggattctggcaaactttttaggacacgacttgtaacctcccgctcgtcctgacgtttgctgagaatttctttcgttaagtttttctcttgagtcatattcttttatcctctctttcagaaattcaatctgctctgcttcagataaacttgtatagtccttacgaacgctggcgttgagaaaaacatgtttaatctcgtgactggttttgtttacccaggtattgagacgtttttctatttgcttaggcgtaggtttttgaagagtcaactttccctcttcaatatagtttttacgaaacaacgggcttttcagattagtgaactttttatctcccggtaacttaacagcaatatattcactggcctttccttcatttcttatcctaacctcaccatattctgcaacaatctgtttgaatacagcataatcacttactttttctttttcaattcgataattcaattcattcttaaatgcagaattacgctctacatcaagatctgcttttactctctttaaaataacactataatcactattttttctcggaaagtccttcgggctggcaagattatatttattgttaatatgctcctgtattgcatctagctgttcgatagtatgacctttccctataaggccaacaggatcaagtttatctcctgtaactagattaacctttggaatgacaatatgaatatgaggctttctttcaattaactctcctgtactattatcctgaatatgccggatttttggcaaatgtgcttcagcatagaaagaatattcttcaggatgataagcattcatcaataattttttataatcatccacaaccgcctttaacatttcatttgatacgtgactttcatgaaaagacaacgtaatgtgcaaataacggtcctgtttgttgtcttcaatagaattgataatcttatctgtagtctggagatcaccatcaagaacaacacgatgatcaagttcatcacgtgtgtactgacgttctgctttgcgaccatttatcaggtaatcaacaataccgtcattaccaccaccatatctgacaatcatttggctatctcctgaaggcgatcacgaataccaatcagcacatttaaaatctttttataaagcgcctctgatataataccctttaaatgatctgagtttaagcggtgagctatctggttaatattattcccagcccaacttaactgagaaagacaccgtttgtattccgggatatggcgtttatctgatgtgtagttttttattttaccaatagtaagcagcctgaaaaattcagacttactaatttcaagctctctgattgctctgtcaaatggagcatactcttcttctgtaagtctgaatgtcacatgaacacttttgttggcttttttcttcataagtcctcaaggttcgtagaaccgcactagaacggctgcgccgttcggggttgcaaaggggcgtcccctttggcacaagcattgtaacatgcccggaacgggcttgtgtacaaagcttatcgtgcctgtgttttagaaggacaaaaaaatgccgtgcatacagcccacacaatgactcacataatcacccacaactcaaaacacacagcccacacaatcacccacactttaacccacaaaaaagaccacaaccccattgacaacccacaaaacaacccacataatcacccacacaaacggcgagcaaattgctttaaataaggtattatgccaatgtaggaggtagagagagagaggaaatgtaacaaatgaaaaagatcgagagtttattatctccaatatgcgaggctataaacgaaacaaaatcgaaatcaaaacaggctgtcttcaatatgtatttgcaaaatatacttgaagcaaagaaatattatacatgggagcaaatagctgattacataaacaacaacaccaagacagaactagcccaaaagacttatataaatatgacagagagggctaaaaaaagacaaaaatgcactgaaccaaaagaacaggcaaaaaccatagatgtaattgttcagaatgaagctaaaggcgatgaaccgagagggggggtaaaaggttttttttcaaacattagtgagaacaaaaaagaaatagagcacgatccaagtgctacgaatgaaaaatttataaataaatatctttaagtaaaggagcattataaatgaaaaactcaatcaatttcatccttcagggtaaaggtggtgttggaaaatcattcgcgaccgcaatactggcacaatactttattgatgaaaatcacatggataatatcgtagtcggtgacacagacccggttaatacaactacggttaaagtaaaaagattaaatgcagatttgatacaaatcactgaaaacagcaaagtaatacaatccaaattcgatccaatgttcgaatcgatgctgaccaatagtcagaatacttttgttattgacaatggcgcatctacatttttaccgttaattcagtatttcaatgataactgtgttatggacatgtttgaagatgtagaacaagacgtttatatccatactgttatcgttggtggacaagctcttgcggataccttgcagggatttgaagaactgaaagaactggttaaaggaagtaaggtaaaacttattgtctggataaatgaatttcagggtattccagcacttgaaaatatcccattaatagaaactaaattcattgaaaaaaacaaggatgtaatcgctggcgttgtggttattcaggacagaaaaagtgatgcctttgcctctgacatcaaagagctaacagaaaaatcactaacactgaaagaagctcttgagtccgaccattttggattaatggctaaatcacgattaaaacgagtcttcaatgacatttacaaacaattagatagcatctatgacgatgaatacggtgaataatatgagtacagttaatcagccagaattaaaacagcctgaaaaggctgtttccagtgaagatattgataattttattgttgatgtattcaaggagacagggcataaaatatcaaaagatgatccagttatttcattaatttttctgaaccaaaagatacaggaaaaattcagcaatgagttacaagctaacttcacagccctgtctgagggcttcagacaggtcgtttcatctgtagaaaatgactatattcaaagattcaagaatattgttgagacgtgcggcgatctggataatgaaataaaagaaaaagtagaagagggaaaaaacgatctaaaagaaacaagtgttgaggtaaaagaaaaattaacagatgatattattgaactcatatctggaattaaacgcaaccaggaaaaaaacaacaaattatatgaagaaaagttgaagtcattatctaaggctgtaaaacccttcagtacaagaacagccattgcaatttgtgccttgtgcacattatgcctgtctgcggcattttctggcgcaacctggtatgttgcacaacatgaaaaagaggcaagcctgcgcttctatgcaagagcttttcttgatatgaaaaaaataactgaagagagcatgagaaaattaccaaaatcagaccagcaaaatataaaactcaaactagacgaaattgattcaagaaaaccatagatatgaaaaggagtcactaatgacaacttttaccgacgacgacaagaaactaattaaagaaatcagggagcgaatcggcagcctggacgtgcgagacaatattgagcgtcgggcttatgaaatttctctggcatcgctggaagcagagccagttatgttctgtatatcaggacaaaatgtagattcagaagaacatgtatcaaccagcaaagcggttgttgatgcctgggttgaagaatggaatcaggttgacggaagtcctggcgaaccactgtacaaaactatgccactctactgtcacgctgccttgccagcgccggtagtgcctgaaggactggttaaagcggtgcgtttttatgagcaggtaaaaaatgagaatccgccagttgggactggtgcgtggaaagacgctgttgactgggtgctcgaagaggcttgccaggctgtaaatacagacatcaaaggatgaacgatatggcaaccaacaatcgtaaagccaagatgctaatttcccgtgtatacagactttgctaccccagccagtggttgagagttagcaatcgccgtgtggtgttgttctcattttctggaattgccagagagggaatcaaagataagcgcagcgcggcgcaaaaccgctggaaaaacaacttgcgcactaaaggagcctaatatggctattgccgcaagttacaccatgcatctctactgtgattgtcgccagtgtacaaatggtaaatatcagtcgccagacttcggtgagtatatcggtacgtcatgggctggctgtgcaaaagaagcacgtaaagatggatggcgaataagcgccgacaaaacacgtgcttttgcgcccggacataaagttttgaggattaacaaatgacaacatttaccgacgacgacaagaaactaattaaagaaatcagggagcgaatcggcagcctggacgtgcgagacaatattgagcgccgggcttatgaaattgctctggcatcactggaagcagaagcgccaaatttgcctggtggtttcacaattgaagaagcaaaagaattacacgaaaatctggtaaaaagtcacgtaagcaaggctttaagtggcgaaaaaatgaaaaaagaaaatcgtgatgccgatttgcgctggattcatggcgtaatagttcaggccgcgtggtttgtgaaagcatcactagggcagaatgcatagtgcgtacctgcttttctcctggcaacggtggatcttccgcttcctcgtcactcgctcgctatgctcggtcgctggactgcggcgagcggttagctatcaaaaaaaatccccgcacaacgcggggatagttttatttatatgcaagttcatgacgtgccgcctgagccagaaaatggctacgatctttgtatacgccgccactttctctcacatatccatcaatacgacgaatcaatacatcaggcaatgaaatattaatacgttgttgtttgccctcaatttctgacaaatcaacatcaattacaaaccagctatcacagtggttataatttgggttggcggaataagtcaaacacccttcatcatgaatatcatcaacagaatgagcaccgcttattaccatctcttccacgattgctaatatcgcttcacgcgccattgcgggtatttctgcctgagaatcagcagcagaaacacatccaaaatcaaagcaatcaaaaaccggaacggtgataccgtatgctgtatgatcatctttcggtgtttcgacaccaacagaaaagaacatggctacctccaaagtcggcggggattaaatccccgccatttttttgatcgatctgacagtacctagcggcaagtcctttttaggatgaggaacaggaaaagtttttcctgttattggcgaccaccatatctggtgactgcttgccttatgccgtttcaactcgcaaccagcagctatcagttctttcaacaggtcagcagatttcatatgtcctccctaacctgaaaacaattatacacacgcatacacacaaaagcaaattatttcattcgtatgacttatgaaacacactgtaaagacagttcaatctttacagtgtaaatcatttatccagttttatcgctatgcatgtgatacatagaaaatcatatagtgttttactatatgatacctgattgacacttttaactgcacatctcatcatttacatcgtaaagacaaacatagctttacaatgtaaagctatataattaaacactccgtgtccctgataaggaaaaaaaatggctcaaccaaccccagaaaagatactggcaatcatagatgatcatgatcgcgcacaaaaaaaacaacgcaacaaaaacgtcttcatttatttatgtctctgcttggcaattattggagtggtcgcgcattcctttatatcaacgtttcgtcttgatggtgtagccgtccttacaattcttttgggcgtgtcagcaatcgcattttttctacattatgtagaatcagggaaaggccagattcttagcagtgaccgcatattgtccatactcgctcaaaccaaagattaccccacaattcgacgtaaagttgttaatcgcttgctctccggttcaaaactcacgggtaaagatgaagagtacatattcagtgaactgaaaaaggctgaacaaagcaacgaacgtgaaaagagattgcaagcaattaaagagtatacatcgtaatacaacgtaaagcatcacttgtaaatacaacacactacatcgtaataccagaaaacaccaacgccagcgagcaacaaaaaggggcgattaagcccctgcgcgatgattaatgacttctttttccagtgcctagctctggatcaagcctgacgttaaacacacctttaaagggcgcgtcaggctcctttccgtcctccacacaggactgtaaatacaaatcaaccgatgttttaaattcccgttccaggtcagctaatgtttctgcctcaaaagtcaccagatctcgaataaatgccagctttccatgcaggatattattttcaaaatccggctcaactgtacctaaatatcctttatattttaaatgtttcataaaaccccagcctctttcaagaaaagttatcagatagaagggtgaaagaaaataccagggagcagcgaggccacatacccctaagcgcagcgcaaccgccggaaaacgcaccacactgtaaagacaataaaatctttacaacgtaaagctaactatgtaatacaacgcgctacacattgacatcctccacgccctaaaggacgtggattcctacgacgttcaggctgtcgcctgaatcatttcggtgggttcctgcttcaacgagcggcctgactgcaccatctctccacaggcaagaacggcgtgccccgccgctaaaatgttacgagcgccatttacatcggcgttcgctgtatatccacatacctggcatctgaattgactttgtgacaggcgattttctttcgctgtatgaccacagcacgtgcaacgctggcttgtgtacgctggcggaacagcaagcacctgaccgccacgccagagctgcttgtactcaagctggcggcgcatttcataccagccctgatccagtatcgaacggtttaaacctgattttgcccggacattgcgccccggctggctgaccgtacccgctgctgactttgacatgttgctgaccttcaaatcctcaatgactatcattgcgtggtttttgctgacggtcgttgtgactttgtgaaggtagtccctgcggatatttgcgatacgggaatacagtcgctgtattttgcgtttctgcttctgccagttgttgctgaatttgaccttgcggcttaactgtcgctgaagtctcgccagcgtcttctggtttttctgaaaactgtttacaggatcaaaaatagtgccatctgacagcgtggcgagtttagccacgccagcatccagcccgaccattgatactgaagggtgaaccggagttgatacttcactttctgtctgaatactgatgtaccacttaccgcaggactgactgacagtgacatttttcacaacgcccgtgacctgacggctgttccggtagcgcatccagccaagtttcggcagaaaaatacgactgttttcctgatcgagcttaacgccctgcgggtagcggaatgcatcattctgtccccgctttttgaatcggggaaaagccgcccgcttctggaagaaatttttgtaggcccgctcaaggtctttcagtgactgctgcaatggctgtgatggggcatctttaagccattgggtttcagtggcatttttccactcaaccaaccacgaggccatccttgggtaaggaatatatttgttccctgcctcatggttctcattctgaagcgccagagcacgattgaaaacgaaacgacatgcgcctgcgaagcgcctcatttctcgctcctgttgaccaccgggtcttaactggaatttaaatgcctgtagtcgtttcattcgaccattttaaacaaaaaaagccaggtggaaaacctcgccttatatcctcgccctgaaggacggggttttacggcgcactggataagaaagggagagcattacactctccctatatatgactcaaactaaagcattatcccggttatgcgcccaccaaatgatttcgctaataatccatgcttctatcgcgggtgtttttacaggttccccatttacaatgcggtttgcaagctctatcatttcacatactgacatttgagaatctccaaagatgcatctgtcatttggtaacaggctgccccacagcctgttaccaaccccaaattagtatttgctgattactttaccctccttaatcatttttattagttcctgttcagaatattcttttccgtgttccaatgtggaatatatatcgccaatagtccatactccacactttttaatttctgcatttagccaggattcatgcagaataaacaacggttcgcaatcatttcctttttcataaacataaatagattcggtatcatttccagaatcagaagtaccaacgactttttctatatcgaaatgtttttttagaaaagttgtgaaatgcattttcatgctcctgccgctgagcggctttggtggttggggaccatcccctcccgatgtgtttataataggtcagaactgacctattatcaagtatttttccctccattcttcaaaaaaaacaccatcaaatacatatagttatattcatgtgatgcccgacagggcatggaaggggcgaaagaaaataccagggagcagcggggccacatcgccccgaagcgcggcgcagccgctgacgaacataccaggatgcacagggccatcccttcgccctgcaaagccagaacagaccaacaggccatgatcatgctgatttgcgccgcagaatgccgcagttagcgcgagcgacagcgagtttacgccgtcctggtgcattacagcagggcggggcgctgtactgcgcgtgtgagcgtcagcgagctacgggcgcaattgctcattgttcaatgcaactggggctattaagtccagccataaattcagttatggtttttgtagcttattccgtgatttcgtcatacgttaattctattttcatcttaatattccttaattacttccagaatcagaattctttttattccttttacaaagtacataatcagggtgttctccagctaaaagcagaagaaatttaaactctactggtgtaagtgctgtaccgcttgcagttccgacaggttcttctttgcgacgccaggtacgcggactcatgctaaatatttcggcacattctttctgtgtcaggccaattttttgccgcagacgtttaatgttttctggtgtgttttcatttggcattttttccctcactcatttcctgaatcatcatagaaacaatttctttatcattctctcttaatccgtcgctggcaaagtcgatagtgtcgaatgccttctcatgaaaaacaagatcggcaacagttttcaccgttgctttcgtttttcctaaagtcgcagacttagaaaaagtttttactcgcttcaccagatgaaacgtatcaccttctttattcagataatattgtctgtcaccttttcttatcttcatattgagatagtctccccttttaacagtaaaggggcatatagcccctttcttttaactttttccggtaatcaaatcgacatcttcctgataaagctccccaagaaccggaacaacgccttttttataatcacggatattatggcagtctgtaaaaatgacgacataagcctcgcctgttttttcatgtttaaggcaaattgtgcaaagcgtcacgcgcacaacagaaaacacatgaccagttgtagagacgatagcaggaaaagtagattgtttcatgtttaactcctgccgctgagcggctttggcgattgggggccatcccctctcaatgcattaataataggtcacaaatgacctattatcaagtattttctagacgagctttattgaaaaatcattttcaataaattcatctaacatctttaatataccagctttatttacgaaatcatcctccataatttcgatacttgctgatatttcacatgtaaactcaatgctcctgtcaaatcccgcaatcccagctaatgcagacagcatatgataattatcaatatttatattaccaataagaactttcatttatcctcctgatatggggggaatccccccatattaaaaattacaatctggttgcaagtccggtttgttcattaaataaacattcaagctgatcacaataaatattatcaaattttgatatttcttttactgtagctccacggacacgggaaaatgtcaccaggtatgtatcagagaaggttaatttgattttaaccaaattaattcccttcattgcaaaatttgaaggtaaacgaaagcaaagaccagactcaccattttcatcaaaacaggcaaagttctttgcgcctgtcatagcaataaagcggtttccaccaagctgattaagaatttcagtagcaacaaatttggcgtggttttccatttttaagctcctgccgctgagcggctttggtgattggggaccatcccctctcgatgtgtttataataggtcagaactgacctattatcaagtattttttcctcctttctttaaaataaatatcgttaaatacaaatatttacattcatgcaatgcccggcagggcatagaaggggcgaaagaaaataccagggagcagcggggccacatcgccccgaagcgcggcgcagccgctgacgaacataccaggatgcacagggccatcccttcgccctgcaaagccaggacagaccaacaggccatgataatgctgatttgcgccgcagaatgccgcagttagcgcgagcgccagcgagtttacgccgtcctggtgcattgcagcagggcggggcgctgtactgcgcgtgtgagcgtcagcgagctacgggcgcaacattacattgctgcattcgcctggcattctccacgccttgaaggacggagttttactgcgcaccagataaaaaaaggggcgattaagcccctgtattcactattaacaatttaacatggttgcaggggataccccctgcaactattttcttagtagtatgatgtgaactcgtgtttttcttccggtgatcctttatatgctgtttcgaatgactcaatttcaattgctggcgtactgtaataatcacgcactcgccgttttaatggctcaccacagaaatcattgagtaatggggtcttatatccgctcattgaatgagtccgatgaactgaagcgcgaatctcctggacagttacggtttttttgccatgaacagaaataacctgatagaaattaacgttcgtttgctcatatccccaggaagatacaaacacatcgccaacagaaacagtgccgttattaaaagttaatgttttcatttttatctcctgccgctgagcggctttggtggttggggaccatcccctcccgatgtgtttataataggtcagaactgacctattatcaagtatttttccctccattcttcaaaaaaacaccatcaaatacatatagttacattcatgtgatgcccgacagggcatggaaggggcgaaagaaaataccagggagcagcggggccacatcgccccgaagcgcggcgcagccgctgacgaacataccaggatgcacagggccatcccttcaccctgcaaagcccaacggactgacaggccatgatcatgctgatttgcgccgcagaatgccgcagttagcgcgagcgccagcgagtttacgccgtcctggtgcattgcagcagggcggggcgctgtactgcgcgtgtgagcgtcagcgagctacgggcgcaacaacacaccaggcaaaatcgcatcctgaaaagttaccctgtaacatacacacaatgtaaagcgcaaaaaacaattacattgtaaagacacaaacatctttacaacgtaactataatgaatacaatgtaaagacaaataaacctttacactgtatatccgaggtttctatggggagagcattacttgtcgcatcagataaaggcggtgtaggaaaaagcaccacagcaacaaacctggcttcttatctggtaaataattcacgaacggtcatcattctgaagaccgataaaaacaatgatattcttagctggaacgaaaaaagaaagcagaatggcttattaccggttcctgtttatgaagagtatggcgatgtatcagaagtcattaagcgcctgaaaaaaatatgtgaagtgctgatcattgactgtccagggcatgacagcaaggaatttcgcagtgccttaactgtagctgacattctgcttactctcgttaagccgtcttcagatttcgaagcagaaacgctgactcatgtaacagaaaaagttcgcacagctcaacagatcaatccagacctgcaaccctgggtacttttcacgagaattaacacgacaaaaccacgccacagaaaagcagcgattgatctcgacaagttactccgggagaacccggtgtggatacagccacttcgtacacgtatttcagatttagatatttttgaagcggcctgtaatgaaggcgctggcgttcatgatgtacgtcgcgcatccagcctttctacagctaaagcacaaatagagcttttggcgcaagagttaggcatcaatccctaatggatgtaatacgacagctttacatcattagctttacacagtaaagctaatgtaatacacgaaaggtgatataatggctcttgacttgaaaactccggtaataccaggacaaaaaacagaacaaaccaatgcagacacagcccgattcatcaatgaagctacccgcaaaaaatcgggagcaactaaagtgaccaatgtccggcttggggacgtttacgaagatattctggaacgggaagcactgcgaacaggccagacaaaaacagcaataatgaaagcggctcttgcagcttacgaacacggcctggacgaaaacggaaaaaatcactggattctacagtcagccaggctgaaatgataaagcccttcggggctttatcccttacgttttaattgtttcttctcgctggctttcttacgggcatcgagaaccagttgcgcataagttgcgtgtgctttttttactgtaccagcaggtttcccgtaaaggtcgtaacgtgttgcgcctggtacagtacaattctgaagatattgccaccggaacgtcatcacctgaaccgcacaattccactcttcaatcgtcagatccacatccgggttatccgccaggtatttctcaacgtcctggagaatcccgcttttcaggggcaagttctttttttcgtctgtccatagttcaggaaaaacagcacgaactttattgaaacacttttcaaaatattctttcggatattttgggggaaaagtgatttgttttttcaaataccagggctgaggctgctttttatgtgttttctctgctacagcatctttcttctgtactttcttgttttcattaactgctgatttttgtacttcctgcggcttttcattcaccacaggattttctggcatgaccagaacgcggcgttttttgaccacaatcacgggtgttttttttggctgcatactcgcctcaataattgctgtcatattgactaattataccattttcagcagttaatatcctgaaaatacatggaaaagggggtatccgtacagaataccccctttgcaaaggcgcttaatgccagaaccacatcatccccaaaaaggcgggctttcgcccgcctccgggttgctacttaccgttggattcgtaagccagacttgccgtaacctccctgtttccatctttcagccggacctcgcacaaacgattccgggtcagatacgtgaatattaacaatgtgcagcacacgattaataaacaccaggtcagggcgtttttcggctgtttcatggccttcttctccttgcgtaacgcgcggtaagaggctatcctgatgttgttgaagcattgggatcgcctcgtgggtgtactgaccccaaaaagttggacagttaaacacgaggcatataggtctgattccgatattcaattggagtcagaccttttaatttcaggctaattcttctgctgttgtagtattcaatatattccgtaacagcatccttcagttcgcttatattactgaactcatcaagataaaaacactccgactttaaggttccaaagaaacactccaccacagcattatccagacaattgccttttctggacatgctttgtttaataccatgttctttaaggatattttgatatcttctcatacgatactgccatccctggtcagagtgcagaacaggatgctcgtgaggattaagctttttgaatgcctgatcgagcatattctcaaccatgttcatcactggtctttccgaaaggctgtaagaaataacttcgttgttgaagagatctattactggagacaaatacagcttgcgcccattgactgcaaattcagtaacatcggtaacccacttctcgtttggccgcgtagccttgaaatctctttggagaacattaggggcggtttgccctacctctcctctgtaagagcggtatcgcttgaccttaatcgctgctttaagtgagagggttcccatcaggcgctgaacagctttatggttaatctgtttcccttctcgatgaagagacagcgttaccctacggtatccgtatcggcctctattctcgtgataaatctcactaatacgctttttaacgtccgcatacttgtcaggcttgctgagagcctttagatgataataaaacgtactgcgcggtatctccgcagccctgagaagctcatcaagaggataaaactgccttagctcgttgagtactttcactttttcgtgggatgagctaaggctttcagcttttttagatacataagccgcgtttcaagaaatcgaacttgcctttcaagatcctcaatgcgtcggtcttttgacagctccaatgctgatgccgctttttctggatcaactgatattgcaatgtttcttttggtgccaatcttgagcgcgcgtaaaccagcttctccgcgctcttcatagaccttcagccacctggctacagaaccactaccagcaagcataaagtgagcagcagcctgattaagggacatgtgctgctcgatcacagctttcacgaccttaatacgcaactctggatcagcactaacgcctttaggtttgggaattaaacctttttctccatgtttttcatagagggcaacccatgtcctgacctgggttcgggggacaccaaaacgtgccgagatgatcctgtaaccatcatcagttgtgaagtagtgattcacgacttcaaggcgcttttcaaaagggtattttggctttgacatattaggggctattccatttcatcgtccaacaaaatgggtgcagtacatgggttaatgaaaaattaactacggggctttcttctttctgccgcacaacaagcatcagcagcagttccaggcttccggcaaggcgatcaacgacaaggtgcggatgtatgggcgcatcggtcaagcgttgattgaggccaagcaaagcggcagcgatccgttcgccgccatcgaggccgttatgccctgggacaccttcgccgccagcgtcaccgaagcgcaaacattggcgcggcctgccgactttgatttcctgcaccacatcggtgaaagctatgccacgctacgccgctacgcgccgcagttcctgggcgtgctcaaattgcgggctgcgcccgccgccaagggtgtgctcgatgccatcgacatgctgcgcggcatgaacagcgacagcgcgcgcaaggtgcccgccgatgcgccaaccgcattcattaaagactaactaccatggtccatatgaatatcctccgcccggatgatcctgacgacggagaccgccgtcgtcgacaagccggccgactaggtcgacgcttggattctcaccaataaaaaacgcccggcggcaaccgagcgttctgaacaaatccagatggagttctgaggtcattactggatctatcaacaggagtccaagcgagctcaaaaattaaaaatgaagttttggaggcctcatttggtgacgaaataactaagcacttgtctcctgtttactcccctgagcttgaggggtcaacatgaaggtcattgatagcaggataataatacagtaaaacgctaaaccaataatccaaatccagccatcccaaattggtagtgaatgattataaataacagtaaacagtaatgggccaataacaccggttgcattggtaaggctcaccaataatccctgtaaagcaccttgctcatgactctttgtttggatagacatcactccctgtaatgcaggtaaagcgatcccaccaccagccaataaaattaaaacagggaaatctaaccaaccttcagatataaacgctaaaaaggcaaatgcactactatctgcaataaattcgagcagtactgccgttttttcgccccatttagtggctattcttcctgccacaaaggcttggaatactgagtgtaaaagaccaagacccgctaatgaaaagccaaccatcatgctattccatccaaaacgattttcggtaaatagcacccacaccgttgcgggaatttggcctatcaattgcgctgaaaaataaataatcaacaaaatgggcatcgttttaaataaagtgatgtacaccgaatttgattgcgtctcaacccctacttcggtatctgtattatcacgtgtatttttggtttcacggaaccaaaacataaccacaaggaaagtgacaatatttagcaacgcagcgataaaaaagggactatgcggtgaaatctctcctgcaaaaccaccaataataggccccgctattaaaccaagcccaaaacttgcccctaaccaaccgaaccacttcacgcgttgagaagctgaggtggtatcggcaatgaccgatgccgcgacagccccagtagctcctgtgatccctgaaagcaaacggcctaaatacagcatccaaagcgcacttgaaaaagccagcaataagtaatccagcgatgcgcctattaatgacaacaacagcactgggcgccgaccaaatcggtcagacatttttccaagccaaggagcaaagataacctgcattaacgcataaagtgcaagcaatacgccaaagtggttagcgatatcttccgaagcaataaattcacgtaataacgttggcaagactggcatgataaggccaatccccatggcatcgagtaacgtaattaccaatgcgatctttgtcgaactattcatttcacttttctctatcactgatagggagtgggaaaataactctatcaatgatagggtgtcaaatcgatgcacaacgtgcgttacatatcaaagggaaaactgtccatacccatggataacgggcgtataacacgcccgttgttttatgatgatgtaaaatcttccccaaaactttccccaaaacccttccccaaaactggctatgaagttcctatactttctagagaataggaacttcggaataggaacttcttttgcggccgcaagatccgctcatctgtaacatcattggcaacgctacctttgccatgtttcagaaacaactctggcgcatcgggcttcccatacaatcgatagattgtcgcacctgattgcccgacattatcgcgagcccatttatacccatataaatcagcatccaggttggaatttaatcgctgcctcgagcaagacgtttcccgttgaatatggctcataacaccccttgtattactgtttatgtaagcagacagttttattgttcatgatgatatatttttatcttgtgcaatgtaacatcagagattttgagacacaacgtggttcccgccatatgaaaatccggccagaccaacatcattctggcgctccgaaagaagggatattcgccgccgtgaccagcctggagcgggtcgcataatctttggccgcttcgtagtcgaggaacatggcatgaaccacggcagcctggcggctgcaaattgaaaaccgccccggttcgtcctgttgttgccgcacgccccgcagaatatgtatgctctgaggacctgttttattaaggactcatccccttatgttgacccgcaaaagtatcgatacagttctgctctctgttggtgctgagaagctctcacaacgagaatgggactggatgaaaatgctcaaacccatggacccaccacctgcgatggtgacgacctccatcctgaagcgccgtggcgatacagcagcccttaccctgctacaggataccggggtttaatccatcctcatgttgtccggttttactccccgccctctgaaacgtctgttcacagccaaccagtgctggacgtccttcctggatgcgggcggtctgcgcgatatcgaggttgaagccgtcaccaaaatgctggcctgcggcacacggatactgggtgtaaaagagttcgggtgtgataacccggactgtcagcacgtaaagtacctgaccaactcatgcggcagccgtgcctgcccgtcctgcggaaagaaggccacagacctgtggacagcaacacagctgaatcgtcttcctgactgcgactgggtacatctggtcttcaccctgccggacacgctgtggccggtgttcgaaagcaaccgctggctgctgaatgacgtgtgccgtctggcggtggagaatctgctgtatgccgcccgaaaacgggggctggaacccggtatcttctgcgccatccacacgtatggccgtcgtctcaactggcatccgcatgtacatgtgtctgtaacctgtggaggtctgaataagcatggtcagtggaaaaagctgagcttcctgaaagacgcgatgcgttcacggtggatgtggaatatgcggcagctgcttctgaaagcgtggtcagaggggatggcaatgccggagtcgttgtcacatatcacgacggaatcacagtggagaagcctggtgctgaaatccggcggaaaatactggcatgtgtacatgtcgaagaagacagccggagggcggaatacggcacgctacctgggtcgttatctgaagaagccaccaatagcggcttcccgactggctcattacaacggaggggcaagcctgagcttccgttacctggaccacaaaacgggagaaacggcgacggaaacgctgacacagcgtgagctggtcgcgaggctgaaacagcacatcccggagaagttttttaagatggtgaggtacttcgggttccttgccaaccgtgtgtgtggagagaagctgccgcaggtgtaccgtgcactggggatggataaaccggaaccagtggcgaaagtgtgctatgcacaaatggtgaaacagttcctgagtcgtgacccgttcgaatgcgtgctgtgtggctgccggatggtataccgccgggccattgcggggctgaatgtatcagggctgaagaaaaacgcgcgggatatcagtctactgaggtatatgccggcctgacacaggctaagtgtgcccgggaatcggtgaaagtataaaaaacagcctgttacggtataaaaatcgaccatacagagagggaaaccaccggagtggtgggaaaagcagaaaggctcacgtggcataaggcgtggacaatggtatcgactggtttttcaatttcctatacgtcaagatacaaaccaccttttcgccatgaggcagaaagcctcaagcgccaacagcattatatattgaccaggaattaaattcccagctttcggcgtggactatacagtgtgtgattcaccacgatgaatcctttgttgatccactgtgtgacctgcgcaggttgaactccggtcagcctggcgaacgatgcctgattcccccgatagaacttgttgatgtattcaatcaaaggcattttttaattctccgaaacaacgcaaaatcatatagtaatttactatatgatttttattccgcaagtgattaactcatcggatttctttgtagttaacgaaacgttaaatttagtttgtgcctggaatggcacgcaagaagcacactagcattatcattttgatcaaaacgctatttccccccgttattggggggctttctttttgatgccgcgccagcggcatgtaaggcggcactctgttgttttatatggcacagagctaaaccgccgaagcccggcgtaagccggtactgattgataggtttcaccttacccatccccatcctgctaagccatacccgctttcagccatgaaatagcttttgtgcgcggtcggagtggtcccgacaagggtttacccgcagtcggggcgtatctccgcgttagcggaccgtcagggccgcttacgagcgtgtatttggtacttccagccagaaggctgacagcgatgagatttcttagttacaacatccattattgaaagcgatgttgttcccgccctttgggcgggggcggcggcgcttttcagtgatgggttgggcactgtggctgagtatttgcagcgtttttttgtaggagggttggaggggctttgtttttcattaggcagaagtccatatgcccgccgcgaagcggtgggaggtacttttatattctgagcggcgcggcgttagccgctgcaagcgaaggcatttttgtgattatccacagttgtttcaaagataaatattttccctgcggcgaagcaacgcaggggattaaagaacaggggttaagaatatattgcgggtttgatgttctatgtttgctgctttctgaagttattcctttgcgggtttttgtggataaccgaaggcgtttttactccgataccctattgcggccatcaaaaaactgtcagagcgggacaaaatgaaaaacggtcgtcaaatatgaggaatttcatgaaatgcaggcaacacgaaaagccccgaaggggctgaagagagtgccgattgtatcaggcagctaaactagtggggtggcgaagctgtcagagccagttcaagctgacgtagatctctggctaccagttgctctaatctttctttagtgcaccagtacgcttcgtccggcggcatacgcttcagaataaaccgcgcaatttcgtttcgctgttcatcatacggcagttttgccaggcgattagcacgtttgcgctccgctgctttcttacgtcgggacttgatggcatcgagagaacgctgcgcataccagcgtttacgagccgagtgaacagagatttcttcgccctcgcggataacgccttctttaatcaattgcagacggatttcactttctgcaaggcgcttacgttgctgctcctgaagtttcaccagatcaactcccagcattttccagccagtttcggtgatccagacgtatttcggcagtcgctggcgggattcacgatcccatatcgtcttttctgacgttcccaacgtgccaaaggaaacctgctctgccagcagacgggaaaggcgcgatactgtgactgcggtttcaggaatcacgtctcccttactgtcttttgggcttatttcttctgccaggcgggagacagacatgccgacagtgtgcaatccacgatcacaaaaactcacaagtacaacccatattgcgtcaagcagccgctgtttctccggtcggaatttatatttgcgaccgacactctgacgtttcagtacataaaatggatgcaacgacatgtgcattctgagtgtgttctgaccagtgaccgggtcttttttaacgagacgattgtaagcgtggcccaactgtccgcccagcgccttatagttgtcgggacggaaccaggctggattctcacactttggcttagtggaatgttcaccccggcgacgttttgttgttccgcctttgttttcctgggggaccaggaatgagctttcaattcccgcttcgtagtcctgccagaaacggatctgctcttccggtgatagttcagaccagtgacgtttgctaatcacagcaagctgcacttagcttgcactgtaagagttgatatttccttctcatggaattaaactccacttcaggtaacaagcatacctgaaataaataagctcaaggctctgccttgatgtcagcccccgctaatcttcgctgcctggaaaacacgagattacgggggttttctttatctgaaatttacgttcttgaacaaaatttcagcacctcgttttctgcatttacaaatcgcggaaaacttgcctgcaaatttagcagcatgggcgcaatcgatcaacgatgttcaagcctggctcgtttcctttttgattcagcacacatctctgacagcttcaaaatcgttttcagaacagctactgaagccccttctttactgacgttccccatacaaaaccttacaaaatcagaaattcagaattttgtatattcaaaaaagtttttttgactgcatacacccactcacacgatcgaataaaccacacaaacagtattatctagatttttagatcgtacatcatttaacaaacagaatattattctgctttttagatgttatctagatcattagatcgctcacgcggcattgacaggttttaaatgtcgcacacacaatactatccagatgattgtaaaaagctcgttcatcgcgttttttgtgctcattgcctggaaaatgagcactctttgacgcccgttagaacgcttgtcatctcatgctctttaacaaccccggacagcggtcattgcctaaagccctggcataaggaggttattattcgtgcatttcaagcaccgctggcatctgtcagcaacgggctacgtaacagagtgacgtgccgcgccatctacacaggtaacgactctttatccgcaaatatcattctgcatacttaaacccccttatttggtgaactcgcgttgagttaatctcactcactctctccctgagcaagtcgtacaggctgcaacgcagaagtacaccagatttgccagtctccactccaggtaagggggtttagctatgcatgatgatgaacaatcagataaagagcctgtagtgagtggctgcaacttttcataattagcttatgacgctgtattccggggatgtttctatttcagacaaacaaccgggagaaaatatggcgcgtaagttaaaaattaatcctgtcattcctgaatgtgtggcagatttgaaaggatatccactctatatcatcgttgcttattggggattaagaaataataaaacgctcacaacaacggatgttagccgtaatttccttattacacagcaacaatcttatgatgtgcttacctacatttaccaggaagcacagaagcagataacagcaactaaacgaacactatttaacgagcacaaaagaagaattagtgcgttcaggattcttgatattgacaaaggcatattgcgcaccccaaaaaaagagattgcatatgccagctacgacaatataccaactgtaacaatgaaaagtacccgttgtgagatccaagatagttttacagaactgcgccgctggatgtgttcaagaaagacaggtgatcgagtggaggtatttttgaatgtctaagtaccaaataaacgcaaccatcaaaaaaccaggtggtggccccgtgaaatggactcattacagcgacttccctatgaccgctgaagaatgcagaaaaaacttctcaaaagaaaaagaagcaggaaagtgtttttctgttgatgttcatatttcagatttcatttgcaaagaaatacatccactgtgatgaatggggagaggattaatcatgattgacgctataattacgccaatagttacatctattccgttactcttattaattttagttgcgctgatattcgttaaatctgccgtcaaaatcgtgccacaaggtaatgcctggacagtggaacgctttggtaaatatacccatacgctttcccccggtcttcacttcctgatcccggttatggaccgcataggtcaacggatcaacatgatggaaaccgtcctggatattcctaaacaggaagttatttcgaaagacaatgcaaacgtaactatcgatgctgtttgttttgtccaggtcattgatgcagcgaaggcagcttatgaagtcgataatcttgcatcagctatttcaaatcttgttatgaccaatatccgaactgtcgttggtggaatgaatctcgacgatatgctttctcaacgtgacagcatcaattctaaactgttaacggttgtcgattatgcgactgacccgtggggaattaaggtcacacgtattgaaattcgggatgttaaaccaccaaaagaactgactgaagcgatgaacgcgcaaatgaaagcggaacgaactaagcgtgcccggattcttgaagcggaaggtatccgccagtcagaaattctgaaggcagaaggggaaaaacagtctcaaatactgaaagcggaaggggaacggcaatcagcatttcttcagtccgaagcacgcgaacgtcaggcagaagcggaagctcgcgcaacaaaactggtgtcggatgcaatcgctgaaggtgatgttcagtctgttaattactttattgcgcagaaatacactgaagcactccaggcaattggcacagcatcaaacagtaaactggtgatgatgccgcttgattcaagtagcctggtgagttcggttgcaggtatcagtgaactgctaaaaaacgtatcacaggatactcccaaagttgatatgaaacaggctcaacaatatttgtcttaaaacagatagcggacggtgacaatattgttttaatcaccgtccttatattcatattcacgaatgagcaaatcattaaaatgaaaacttatgggttcatccttcttattttacatataatccctatgggggcatggttctttcttctttttattacaaacgatgagaacaaagtagaaaaaatacaaaaccacatcgtatcaatatttccattatggctgaactggggaggggtgatgatagcgatggctctactgcccctgttaatatggagttttaatggcatattcttcggcttctttctgctaatttatgcatttggcgtttataactaccttcatcttctttattcaatttctcccttttatcatggagattagccatgttatggtatacactatttcttctgtgtattgcacttgaacttataaccggaacaggatggttactcttaatcagtcttggtgcattatcaagcgccattgtgggcttttttcttccgatatcacaagaagccaatatatgcttctttgcgtcaatcagcatactggcgtcgataattaagttcttctatgacaaaaaacataagaaattagacactctcctggtgaacccagggcattcacgttttaaaggaaaagaatttacgctcagtgacgatattgttaacggcaaggggcaattactcattggtgatacattctggcctgttgagacgttacacaatgaaaactaccttgcgggaacaagagttattgttacagacatgcaaggaataactcttaaagtaatgaccatcgaagacaagagtgaaaacaaggaataaatcatgcatctttcgttgttaattccgcttacaggagcagcgatgaatgcactatgtatttttattatcagacttctggataaggattttattgaagtctacaaaaaaacgctaaaaaaaattactgcattacatattttattgatggtgttaagtgtcacaggaatagtatgaggacaattctatgcgaaacgcaaatgaaggaatttctcttgcagctattgtagctaaagaaacaacaacaggtaaatggaatggtactggtgggggtattggtttaggtactggtggtattggcttattcatcggaggtgtttctggttctaaacaagagcagacacaaagggcaaaaaactttgaatcgcctaaagaggaagaatacagtctattaaatgtatacggttcgataataaaagttctcgttttcggcgtgctatttggtttatctgcccgtttatttacatctttatcaaacactggttctgattttgctgaaccagtaacaaccaccacagccacaggaaagattcaatctattatgggtggcatggcagaaatggtaagcattttaggcaccgttgtcccttttttagtaattatcacagcaatgatctggtttctgtttttcagcagcaaacgagaaaaagaagagttaactcgagttgaacgtgaagctgctaaaacaaaactccgtatagatgtctatcaccgtttacgttacgttgaaagcgatcatgtcgtttttgacccgattacaggccgggaggttccggcagaacggacgtgtattaataaactgattgaggcacttgttgatgaaagcaacgacatctcaaaaagaaattgacgaacttctgaatgcaataaaaacaggacattcaaaattcattctatcaatacccgtacatactacccatccaatggcccataaaataatgaagccttacttcaggagaacaggaccgcttctgtattcagatagtatattcaggatttgaagaaagcatttatttatatagggcatacaaaaatgagtgcttttattaagctggcatctgttctggcgttatttattagcccggttgtggttgcaatagcaggagaacaatctcactgtacaaaaatcaacgaataccctttcatcgtcactcaatgcgacgacggaactgtgacagtggtaaatgtgataaataaccgtgtagctgtgtgccgtaaaggggaatcatgcaaagaaataaa

SEQ ID NO: 167 - DNA, 66821 bp, Artificial Sequence
  plasmid TP114 delta oriTcat-tetB
attataactctggacacattacatgactcaagcaaaagctaatctgagaaaacttcgccgtgcacgttatgtcccccctcgaacagtaaagaaaagcatagcgaatacagaacgtgtcgtttcaaaagcaattaccggctgtggtgtcttccgtgatataccacaagtaaaaatcaatctcatcgaaacaaggaaaattttacaaatcgaactggctttatccattgctaacttatctgaggcgaatccaattgagatacgaaaaaaaatcaaaagcattgaccgacaattatcttcaacctcaaaaatcagaactacattatgaaaaaaaacgacgatttaatcactttaccacctcataacagccacgctctcgattacatcattaaaaaagcgtttacaccacgtaaaaccaaaacatcgacagcgacccacaacgtttatagttacaataaagaagaatccacattaaatttccaaaaaattggagaagcaatttttttcggcacagacctggtaattaagctgaagccaaatattagtgcctctggtgaactcttcatctgccagaaggactaagctatgaacattgtttcagaatttcttgagaaagtaacaaccattgttgaatccacagcggcgacgaacgccgctaaggtcgcacaggcaatatctcctacattttttgcggctatagccttatacgttatttatctaatatatgaaatcacgtatgcccaacgtgacatccttatgaacgaggtgacgaagaatatcggtgcattcgccctggttggtgcattcacttattcagcgccttattacagccagtttgttattccttttgtaatgcacgctggctccgacctttctgctgctgttactggaggttcaggaactgcaaccagtgttgataatttgtggaacgctctatctacgaatttaaacaacttccttgatacaagtatgagtatttatggaaagttccaaattgctgagaaaatgggggtttatctagtatgggggattggctatatcggcggaatgcttctcatctattacactactgttttcttgacactatcaactttcatggttggaattcttctttccgctggcattttattcatttgtttcgctctattttcatcgaccagaaatatgtttactgcatgggtcggcagttgtctcaactatatactgttaaatttattctatagcatatcatttagtttcttaattagtttcgttgaatcagttgtccctgttaatggagatataaaactatctattgtagtttactttttccttattactattatttccatattccttatagaacaagttggcacactctgttctacattaacaggtggggtaggtataaatggccttacatcagccgctaatggctttggaggtaaggttgcatctggttttatgcgagcatcaggactccgatctttcaccaatggatttgccagcaaaatgccaaatccattctttaatgcaggaagtcgttctgcatcagcattagttcagggattaaaccgtggaagtaaacttaaagcggggtgattaacatgaaagataaagtattatcatttctctttgctggaataattaccgtaacatcaccatcaatctttgcatctggtattccagtagtagacgttacagcgatagctaaaacagttgaagaagggctaaatcgtgccgctgaagcggcaagacagcttgagcaactcaagcaacaatatgaacagaccataagatacgctgaagaacagaagaaaagactcgaaggcttcactgatttcagcaatggctttgatagcgcatccagctatatgaaggattctctatcaacaataacaaatagtgcaaaatcagatcttagctctttgcgatcgcaatatgacttatcaagcaacattgcagagacgcaacaaaaatatgatgcaatcctggctaagatcaaattctatgaaaatttcaacaatgaaatgcaggaaagggctaagagattaaccacgttacagaaggagttcgcgtcagcagatactccgcaaaaaaaagctgacttatctaaccaattgaatacagaaaaattgacaatggagctacaattgaagcaatatgatattgcagagagacagctaatcgcgtctgaaaatgcaagacaagaggctgttagtcgagaaaagtttaaattaatgatgcaataggtgttcgaatgaaaaaattcataagcactttaactatcttgtcatgcttccttttagctgcttgtgaagacaaagtttatgatgtcagttactacactgaacatcttgaacaagcccaagatgttgtcgaaaaatgcagcaaaggggatatgtctggtcaaaactgcgaaaatgcgcgtgaagccattcaaaaagagcaatcgggtaaagcatttaaaaatatgatgcaataatccttcattaaaaacagctcgcaaagcgggctttttttggctgtacgcagtgaccagttgataaatagttctaatgttcgtgctgcattagaacaacgcacaaaaagaagagtacaagaagacagtgcgggatctaatggaacgtttacaatagaatcaccttccctatagcaaggtgattctatttaaaagaatacccgcctcgtgcgggtcttatcttgcttaaagatctatgaaacctccggcttcgggtattaaactataacttgctttggcaaatattgtttcattgacttcatggaatcttattttctccgcctgttcatatgttacagggaagaacacgccccctggctcattaaacatcataaaatcaccttgcattgcgttacaatgacaacaatgattcgcgtaatacttcatttttgctgttttgctatgggatggataatataattttgaatactcattaatccttgagagagcagaggttgaaattatttcaattttcgttaaatcagtccaccatactctactggttaaccaccgataaatcatatttttctttgaatcaaaatactccatacccttaggggaggatgtttcataccattcatctaatatacaatcttcccattcggcaggatcaactccccaaataacgtctctatacttataccaacgaggcaaaaaaacaccaaacacaggagttattttcttacagcgccaacatgactggtaactttccgcaatataaaaacgttgagaaaaaatattgtaatcatgttcgtttaattcttttacccactgaataaaataaattggatttttcccctgtggaacaaaccatttccgttgttcttgatcccattgcgcccctttttgtttggctaactccttttcttcaaaaggtacatttaaataaaaccgcgccataaccaacttaactccagtattctgttctgatgatgcaacaggatagatatcaaaactaaacaaagagtgcaattccgcctttaatggctcattcgtacccgcctcgtgcgggttttcttttgcctgaaatatggaggaactccatgaaatccatcattttatcgatggttgccgccaccgcattactgtcaggctgcgcggatagcaaaacacaaccagtacctgagtcaccgttaaccaaacatgaccatcagatcacgttgaaaattgataccgtgcgaacagacctgccggacagttctcctgtttgtttgaatggtatgaatatatacgaaagtctgagcgagcggcatccaggcttgtttgccaaaaatcagaacgtgattttccgtagtgcattctttgatgacggtcaggcgatatcctccgaaacaatccgcaaaataatgcagagtaccccgtgcgttgaatcacaaacaacatctgccggaagctgggaacctgccacggaactgctcccccgtcaggcaatatccggtgacactacactggctgaaaaagatcggactgctggcttcacaatgcggatagcaccggagattgagcgtggaaatttccacctgctactcacaaccactgacccgatacggaaacagactgtcgagcagaatattttactcaaaccggaccagccccttatcgtgagtggttttactggagttaatgctgatagccaaagtgagaaccggattgtcatcattacgccacacgtgcgttgattcccctgatatttaaattacccgcctcgtgcgggttttcttttgtctgaaatatggaggaacaccatgaaatccatcattttatcgatggttgccgcaagtgctatcgcactctctgcccccgtatatgcgtctgatccgtgtgcttccgttctttgtctgtacggtaaagctatcggtagcggcggcgggagcgaatgcaaaagcgccgaaaaggacttctttaatatcataaaaaagaaaaagggatctattcgctggagcaaaacctttgatgcccgaaaagcgtttcttaatcaatgcacgaccgcagaccctgcggcgatctcaaaaatcatgagtaagttcggacgttcctggggttaaccatgaaaaagctcattattattcccaccacattattgctgaatgcgtgttcccatgcccctgaacccgcacaggcaaaaggaggttggtatgaactgaataccacaattgagcaggtaagagcagacacatactataacggggtgatccttcagcagcccgtgtcacagccaaacagcactgttcaatacagcaatgataattatctcaaaaaggaaaccataaacgtaactcccgcgcctcgtattgcagaaaccgtaaaaccacgttctgagcaatcagcgacagcgccaaaaaaccagggcagcaataatagttttctgaagccgacaacaaacagcataacttcatctggtgagataaaaacagcagccaaaggagcaactaaacagcattctgaacaaccagcactctctcccgcaaagccaatcagtagcaacaaccatcaggcacaaacggcacaaaagactgatcagcagacaaaaccgcgtcctgaacaaccaccgctaatgtcaaaaagcggttttctgaaaaaaaacgctaacaacgctgttccggccaccacgcttacaggcccatcaacacctgaaaagcaaatttactttgttcgccatgatggtaaaggctcgctgcaaaaagcattaaaagaaattgtcccatcggactggacggctgaaatatccccggaggtaacgaaaactttccgtcgcacgatatcctggcagggcaacgatcaatggccttatgtcctggataaaatgcttcgcaactacggtctgacggtaattaagaacaccgaaaaaagacatcttctgattgattttcaacaacagaaagggaaaacatcacaaaaagcacctgtatctcctgacaaaacccctgcatctcctgtcaggacaccagtttcctctgacaagttacctcaaaaaccgctaacgcctgtcaccgttccgcaaaaacagacagaaaaactcacctggaatcttaaaaaaggttcgacgctgcgggatggcctcaccgaatgggcgtcaagttcaccgtgtggtaattcaacctggaatcttgtatgggatactcctgtgaactacagaatagatgctcctcttattttccggggaaactttgaatctgcattaaaagatacgctgatgctttatctttcagcagataaaccgttatacgcattcaggaatattgcacaatgcgtaatcacaattaaagacacacaacaggagtaatcgctatgggttggttcttcagcttgctcctgatattcctgtcaataggcagttactatctgacagataacaataaccaaaccatacagcgaatgaagttgcttcctgcaaaacaggaagcaattgaatttgtccatttcgcaaatgttatcaatgactatctttataaatatccagacaaacgtaattcaggaggaacgttaacatctgagcaaatcggtataacacccgtttatgatattcatcatattatttacggtaagcgagtttatatctggtctgccgatacagaaggtctgatgtctgctttgcagcagcaaacaaaacattcagcaatgttaggaagagtaaaaaataagaagattgtcgataatcaggggaatgatatgggcgttcccgttccttcctccattccagaagaggctattgtactcattaactaaatatcccctgacaaggggattctgaactggagtctgcatatccgacacatcattatgtgggccggatatatcgctacggcgcggacttcagtccagaaaatctttaccggagatacccatgcaggataatgatgatgtcagcgagcttgatattgccactcgtgaagtccttatcttacgatgcaatcttattcagcttgcttctgaatatataaaaataaatcctcttaaaaacacccgaatctacacagatttaattcatcgttcagcagatgttatcaaaaatatcgaacaaggtaacatccagaataaacataattatctgtcacaggatgtaaaacatacgcttgttttatacgacctgtacaaatcagactttgaacaatgtccgggggcaaaatcccttatacctgtcagggaaaaaattgtctcgctgaaagaacttctttccggcgctaatgagctggacagtatcgttcgtcgcccccgcaggaaaaaacgttcttcacgaatttaatatcaggagataaatcccttatgcagttatcagcggctgttctggcagcactgataagtcagtgtgcccctgatgtatcacccgatacgatgaatgccctgattatgactgaatcaggggctaatccatatgtaatagcgaatgtttctgacggaacaagtaagtattttaaagatgaaaaaggagctattgaatatgcagaaaaattaacagcagaaaataaaaggtttagtgcaggtctgacacagatatacagcaaaaatttcccatcactcaatctgactaataaaacagtttttgacccgtgtacaaatataaaagcaggagcggcagtcctgacggacaattatctgagacaaaaggagggtagtagtaatcaaaaaattctccgcgctttatctttgtattattcgggtaacgaatcaacaggatttattaaagaaaagaaatttaacaacacttcttatctggaacgggttattcgtaacgcgaataactatatcgtgccatcaatccgtgaaaaaactgatgaatcagaaataaaacccccgaatgatgaagagaaaacatcaccggactgggatgtttttggagattttagttaatgaaagtcaaatcaactttgcagtattttatcctggcgtttttcctgtcactaactgcctccgttgcctatgcaggtggactcgataccgcaacaaataccatgacagaacttaagacatgggcatttagctttggtggtgtttgtgctttgtgttacctgatctataacgtcatcatggcattcatggagaagaaaagctggtctgatgtaggaatggcgcttgtctattgttccctcgctggcggtgcactttacgccgggaactgggcgctggaactcttcaaataagtaatccatatatacaactgtgccgcatatttaccttatgtgtgaattgcggcttttttcatggtgagttatggacaaagtaaatgaacatgtcagtgagtcattcatgacttataacgggtttaaccgtcctgcgttaattgctggtatacccttaatgttgttattgttcacggcttttttcgctgttctgacaggcttccccgctattttcctttggggtataaaagggataattattcctgtcatatgtgcgctgtttctttttatagtaaaactggcctgtgaaaatgactcaaacgcactaagagtcatccgtttaaaccttatggggcttttgttaaaaatccgccacagagatttaattattggttattcatctgtcaggtaacatatatgcacaaaatcaaattaaaaaacagtgacaatatggatgttgctcgtgaatatcccgattatcgcttccatataacagacagtattatctttacttctgacaggaaaatgctggcttcacttgttgtagcaggcattccatttgagacagagaacgataatgttcttacaaatttatttaacagcgttaaaaacttcctgattgggttaggaaaggaaggcgacctgtatttatggactcatcttatcaagaaaagagcaaccatcaatggagaatggaattttgacaatgattttttaagcaggttttcaaaaaaataccttgctctgttcacatccagcgcattctataaatcaacatggtatctgacatttgggattccctacgatgatgttgataccggaatcgagcgcatgaatgaaatgacacaacaggcgcaaaaagcacttctaccatttaacgcttctttattatccgtttacaatacttatattagtgaggtggcagactatctatcactattgctaaatgcagaacataacatgattcctttatcatccacccccttatcatccagtatttgtgattctgaatggtattttggtgctgatgttcttgaactgcgtaacaacgaatcggatagtaaaaaattcgcaacgaattatattttgaaggatttcccgatagaaacaacccccggacaatgggatttccttctcaaacaaccctatgaatttattcttactcaatcctttatttttgagtcaccaacaaaaaccctgaagaatatcgattcacagttaaacaaactacaatcagctaatgatgcagccaaaatacagcaggaagaactcgaagctggtaaagaagcggtcgcagccggaattacgttgtttggttcactacactgcgcattaacggtattcggtgatacaccagatcaggccagaagcaatggtataaagctctctgctgagtttattacttcgggtaagggattccgcttcagtcgcgcctcactcgcatcaccttttgtttttttcagtcatatgccgctgaataagaggcgtccactggatacccgaagaacaattaccaacctggcctgtctgatgtcttttcacaattattcctccgggaaaaaatcaggcaatcctattggtgatggctccgccataatgcctttaaaaacggattcaggcagcgtttactggttcaatacacattacagcccaccggaaaaaaatgttaccggacaaaaaattgccggacacgcaatgtttcttggcgcaacaggcacagggaaaacaacatttgaagcaacagccagcggctttcttcaacgctttgaccctttaatgtttgttgtggattacaaccgttctaccgaactttttgtccgcgcatacggagggagctatttcacattgcaggaaggtatctataccggctgcaatccgtggcaactggcagaaggcccggaatcgcccgtctggcacagacttctcgcatttctgaaacgctggacacaggttctggcacgagacaaccagggcaacccctgttctgatgaacatggcattgaattaaacgctgccgtggaaagcattatgcgaatgcctgtcgaagaacgccggacagcccttcttctcgatatagtcagtcctgaacttcagacgcgtctcgccaaatggtgcgacaacggcgaatatgcctgggcggtggattccccccggaataccttcaatccactgcatcataaaaaagtgggatttgatacaaccgttgtcctggacacaaaaaacggtattcatcctgcctgtgaacctttactcgcggtcctgtttttctacaaagaaatcatgcaacgcggcggcaatctgatgctctccattattgaagagttctggatgccagcaaactttcccatgacacaaagcatgattaaaagcgcactgaaagcggggcgcatgaaaggtgaaatgatgtggttaacatcacagtccccggaagacgccataaactgcgcaatttttgcggcgctggtacaacaaaccgcaacgaaaattctcctgcccaatcccgatgcaaaatgggaaggatataaagaaattgggcttactgaaaaagagtttgaaaaactcaaagagctgacgaaggagtcaaggaccatgctcatcaagcaatctggctcttctgttttcgccaaaatggatttgtttggattcgatgagtttatccccgtgctttctggctctgaaactggcctgtctatttttgatgagattattgctgaaaaaggagatgtagctcctgatatctggataccagaactcctgaaacgcctgaacggttaatttctctgttttatacagaacggaaaacaatatgaaaatccccctcataattgcctccgcgctattaattagtgcatgttctcacacccccaatcctgtgcagaaaaaagggggatggtttgagttaaacacagcaattgaacagatcaaagcaggtgattattaatggaaaacacaaactattatgaacattcaaaaaaagaagccaccaaaaagaaatttgaagaaaaaaacgaaaaaaaggattatttcaaggccatacgtgactttgagcgcagtgaaattgaaatcataaagaaaaaggcaaaaacatttaccattctcgccattggtgaatttgttgtaatttgcattcttggtttcgcaatagcctcccttgctccattaaaaaccgctgtaccgttccttgtgcgagtggataacagcactggatatactgatattgcccctcaattatctgatgctaaggaaagttatcaggatgttgagactaaatatttcctgtcaaaatatctcattaactatgaagcatacgactggcagaccatccaggaacaggccgatacagtaaaaacaatgtcttcccaaaaggtgttttcagcttatgacaccatgattcgtgctgattcctcaccactgaacattctgaaaaacaactacaaaattaaggtccagattaattcagtaatccttctaaggaaggatatggcgcaggtgcgtttcaaaaaaatggtactggatttatctggtaaacccgcccccggatacagagcaacagagtggatttcgacgatttcttttgactgggataaagatatcaaaacagaaaaagagcgccttgtgaatccgctgggactgcaagttctgagctaccaacctgatccagaggttataaaatgatgcttaaacgcactactgcgatagttcttttgtcgatgctacaagtacctggtgctttagcagctatgtacggcacaccatcggaacgagacgggcgtattcagaccgtagattataacgagcaggatgtatttaatgtgcgcgtaaaagcaggcgcacaaacaacaattaagttcggacaagacgaaacaataaaagatgtcggaattggtgatccagaagcctggtcagtatcggtcagggacaacactctgtttctgcgtccaaaagcagaagaaccggatacaaacgttaccgttcagaccaataagcatatatatcctctttacctgatatcaaccacgaaacaacccacgtatattctgcgttttaattatccgaaaccaccgtcagctaccgtaatgactgaaaagccatttccatgcactgatggtggaataattaatggtcattatcaactcaagggggacaaatcaattttcccttatcaggtatgggataatggcgaatttacatgcatgagatggactaataaacaggaaattccggtcctttatcgtgttgatgccgatggaaatgaacatctggttaacggagacagaaataaaaacacaatggtttactatgacgtggctgaaaatctccgtttgcgcctgggtgatcaggttgcagatatcagaacatcatcaatcgttaatcgtccgtggaataaaaaaggtacgtcaaacggaaaaacacgagtagagaagttcagctatgaaaaataaagatgatgaaaaaaataatgacgcgggaaatcgcggaattatcgaagtaaaaggtaaagcagcaccaaaaaaaatattaatcctcatcatattactgattgccgcgttatttgtgatcattatcttgtttaaagttctgtcacgagaacaggtcgttcagcaaacacctcttgagaagtctgacgagacactggtcacaaataccaacaatggcgtttcactgacaacaatgatgaaaaacatcgaagaaaaggaaaaactcgatgccgctaaccgcaggaaagcacaggaggagcaagaacagaaacaggcagacaatgccccgtcagcgccagcatcacaaaaggccgatcaaacagccgtcaatgtgatagccaacggcactccccaaaccgccagtggagatccaaaccaaccacaaccattgccaaaatccgtccgacaactgatgggcgacacaatggtgaagatcgacaatcaggaaccaggcgaaaaaaaccaggaaagagatgatttacagggcagtcagtacgcagacggaaaggtatcccctgtgctgaaccgccgatatctgttatctgcgggaacagcattatcctgtgtgctcaaaacgaaaatcgtaacctcttatcccggtatcacaatgtgtcagttaacacgagacgtctggtcggataacggcgaagtgcttcttgcccgtaaaggagcattactgatcggggagcagaataaagtcatgacacagggagtagcccgtgtgttcgttaactggacaacgctcaaagatgaaaatgtcaatgtgcgcattggcgcacttggcactgacagtctgggtgcttccggccttcctgcatgggtcgataatcattttggtcagcgttttggtggtgcattgctgctgtcattacttggtgatggtttagatattctgaaaaacagcacgcaacaaacaggctcaaacagcaatatcacctacgaaaacacatctgacgcaacaaaagaaatggcaaaaacaacgctggacaatacgataaatattccccccacggcatatattaatcaggggactgtattgtctgttattgttccgcgaaatatcgacttttcatccgtatatgaacttcagtaattcagtaaagcaattgatatgaataacatcagagataccagtaatacatcacaaccacgagataacagtaaaaccgcaagacgatatctggatatgacgggtatccagtctgttcttaatattgaacatgtcacagaaatatctgtgaataaaccaggaacaatatggtttgaaggaaaaaatggctgggaatctaaagatgcgccagacgcgacttttgataatttaatgacacttgccaaaactctgacgaacttatcaaagataaaaataccacttagccatgataatcccattgcatcggtagttcttcccggtggggaacgtggacaaatcatcattccacctgcaacagaaaataacagcgttgtgatatctatccgtaagccatcattaacgcgctttactatagatgattatgtccgaacagggcgttttgataatgtcaggattgcgacgaaacacgaagccatcctgactgaacggcaacgctacctgtatgaattatcccggcgtccagatggtcaatctaaagctcaatttttaagagaggcagttaaagaccgtcttaattttttaatcgtcggtgggactggctccggtaagacaactatagcaaaggcaattgcagatatctttccacctgaacggcgttatataaccgttgaagatgtaccggaaatgtctctgccgctgcatccaaaccatatccggcttttctacaaaaaaaataccgttgaagcgaaggaaatcattgaagcgtgtatgcgattaaagccagatcacatctttcttgctgaacttaggggtaacgaagcatggagttatctggaggcgcttaatacagggcatgaaggctcaatcagtaccattcatgctaataatacttatgcctcattttcacgactggcaagtattgtaaaacaatctgatgttggtatgactgttgatatggacctcatcatgcgcacgataaaaacatcaattgatgtcattctttttttcaaccataccagaatgactgaactgtattacgaacccgaagaaaaaaatcgctttttgagcacaatgtaaattctggagataactatggatgcaaaaaagacggggggattaattctcttcctgttactgcttcttgtgggtgtgcttatagcctcaaactatctcggtggatacacagcattaagatattcatccgttgatatgtctttgctcaagtgggatacattccattctgtaatctcaacattttctggcaacccacaatataaaaaactcgtttttatggcatggtttggattcagcgttccattaatattctttgccatattcatgttaattgtcgtgattgggattatgcctaaaaaagtcatctacggtgacgcccggctcgcaactgatatggacctaagtaaatcaggttttttcccggataaaaaatcaccttacaaacatccaccaatactcatcggtaaaatgttcaaggggagatacaaaaaacaatttatttatttcgccggacaacaatttttaattctttatgccccgacacgttctggtaaaggggtggggattgttatccccaactgcgtaaactatccaggaagtatggtcatactggatatcaaacttgaaaactggtttttatcagccggattcaggcaaaaagaattagggcaagaatgctttctctttgcgccagccggatacgcggaaactatcgaccaggccattaaaggacagatacgctctcaccgctggaatcctcttgattgcgtcagtcgcagtgatttacttcgtgaaacggacctggcaaaaattgctgcaatccttatcccggcaagtgatgatcctatatggtctgattctgcacgaaacctttttgtcgggttaggactttacctgctggacaaggagcgttttcacctggaacagaaagccaaaggtcataatgtaccggacgttcttgtttccatcagcgccatactgaaaacgtcggttcccgatggcggcaaggatctcgccgcatggatgggacaggaaattgaaaaccgtagctggattagcgataaaacaaaatcattcttctttaagttcatgtcagcaccagatcgcacaaggggaagtatagaaacaaacttttcatcaccgctgagcatcttcagcaaccctattactgctgaggcgacgaatttcagtgattttgatatccgggatattcgtaaaaagcccatgtcaatttatcttggtctgacaccggatgctttaatcactcatgagaaaattgtaaaccttttcttctcattactggttaatgaaaactgtcgtgaactgccggaacacaacccggacctgaaataccagtgtcttattctcctggatgaatttacatcaatgggtaaatcggaggtcattgaacgcgctgttggttttacagcaggttataaccttcgctttatgttcattcttcagaatgaaggacaagggcaaaaaagcgatatgtacggtcaggaaggatggaccacattcactgaaaacagtgctgttgtgctttactatccgccgaaatcaaaaaatgctctggctaaaaagatttcagaagagattggggtgcgtgatatgaaaatatccaaacgctcaatatccagtggtggtggtaagggaggaagttcacgtacacggaatgatgatgtaatagagcgcccggttcttcttcctgaagaaattgtgtctctccgggataagaagaataaagccagaaatattgcaatccgtgaaattataaccagtgaatttagccgaccatttattgccaacaaaataatctggtttgaagaaccagagtttaaacgccgcgtggatatcgcccgtaacaatcatgttgacattccaaacctgtttacacaagaagtcatggatgaaatagcaaaaattgcagaaatttatctccctaaagctggaggaaaaaaagtcatggttgccggaggcaatgtgattactaatccagaccttgataatcacgataaaacagacgtatctgaataatcctcgcaaccagcaaatagtattttgcatattccataaggtaattaaacatgaataaaaaattgctttgtttattaatatcctcttttttattatcaggctgtgcaaacttcaaaaaaatcaatgctaatgaacttgctgccgaaagagacgcacaaaaagcgactgaatacgcgaaaaaaattcgtaataacccggttatccaggattcaacaaaacaatggattaatacaacgccaattattgaaaagcaggtaaagcaatcagcgccgccctgcccgattgtgattaatactcgttcagatattgagctacgccagatcgcacaacgcatcacacaaacctgtcatatcccggtacgaatcagcgccgatgtctggacctatctgaacggtacaggcactggctcaacacaacaaatgacaggctcaattccagcacctgatgcaaatggaatggttcctctggcgtcagtaggcagtcagccagtaaaagtctcttctggcggtacatcactccctgaactgaatatctccgggcttcctgccctactgcaaaccgtatcttcacggctgggaatatcctggaaatacgataaaggtcgtatcacattcttctatctggaaacgcgctcattcccgattacatatatggacagcaatgtggcatacaactcaaaagttgtgagcggcacaatgtcttccagtggcagtaccggctctacaagttctggcggtatgactggcgacgcatcaaatacgcaaactacaaccgtggaaatgaaatcatcgctgtacaacgacctgaaaagcgaagtttcctcaatgctgacaccaggtacagggcgcatgtatctgtccacaggttcactgacagtaacagataccccggatgtactggacagcgttcaggagattgtgaacaagcgcaataatgaaatgagtcgtcaggttgtgctgaacgttgaaatcctgagtatcaagaaatcaagccaggaacaggcgggaatcgactggaacgcagtatttaatgatggtcatcttggtctgagtcttggtggctcatttggtgatgccgccgagaatgttattaccagtggtgtatccatcgtggacggtaagctggctggctcaaaagcatttctgaaagccctgtcgtcacaaggcagcgtcagtgtcgtaacgcaaaactccgctgtgactaaaaacctgacgcctgtccctatgcaaattgccaatcagcagggcttcattgaaagtgtcacaaccgattctaccgccaatgtgggatcatccacgtcactgaatgcggcaacaataacaaccggattcaatatgactctgcttccatacattcagccggattcacaaaacctgcaattgctgttctcaatgagtctgtctgacaaacctacttttgaggtgttcgaaagtggcggcagtaaagcacaaacaccgaatgtggatttgaaaacaattaatcagactattgatctgaaatcaggccagacagtcattctgagtggattccagcaatcaaaccggaaaaccagtaagcaaggtgtaataaccccctccttctttggacttgggggtggcgttaacagcgaagacggcgacacgattctggtcgttttgattacaccaaatgtgcttaattccggctccagtgcagtaataaaaaatgtgaactaattaactgaaaactccctgaaaaaacacagggagtttttttggaggtcactttgtctgagaataatcagaataaccagaatttcacttcggttattaaaaacaagcgtgcttttttctccggtctggactggaaaacgcttccttcagaagaaaagaatgcgcgtacattcgcaagaaaaaacgacgctgaatattttctctcctgtcagtatcaggattcagaaaatgaaaccaaaacgatggtggcatttatcagaaaagaggatcttcccacaggggcgtcctcattctggtcactggcactgatgataaaacccctcatcgaacctgacggatacgctatctgcgaactcggtgatctttatggctttgtttcctgcgtcaataacgttctcgtcaacgatgttgtaggtaacaaaagtcagatcatgagtgctctgacaacatttcttgagtttaatgaaacaccagaacccggctggaaactataccagcctgaatcatgggatatcagccaggcactcccctcactcactctgtctgcgttgattgacgtaaaaaaaccgccgaaagaggcggcgtttactcgcgtatcccgaaaacgtcagttcatgatttatggcggaagtgccattctggccatactgctctggaacgggatcaccatgtaccaggaataccgggaaaaagaagctgcggcagaagctgcacgtcttcgtctggcaaaagaaatggcagacaaacaggcaatacagattgccccaccgtggcaacatttacctgaaataaaaccatttattgataaatgcattgataaatgggatgcactgcccttatcgatcgccggatggcgttttgaccttgctgaatgcagcacatccggtaatgacgggctgttacgcacatcatataaggaactgagcggcgttacggtcgaggacttcagcacacggatacgagaaatattccaggggacaaccacagcaacttttgtattgccagaaggcagcgccgggggattttctcttcctgtcagttttgacgtttcgcctgatccaattaccccggacacattgccacaggcaacagatattcaggaacgcctgacaacatttgcacaaaaaatgaggttaaaactcacctggcaggaaattgaaaacacaaaaacagatgaagaaggccgtccaataattctcccgtggaacgagtatgaattaatgattcagaccagcaccccgccttcaatacttttcgctaactttcatgaacctgccgttcgcttccagtatgcaggaataaaactggaagaaggaagactgaattatgagattaaaggtgcattctatgttaaaaataattaaaccaacgattatttctgtctgttttttcagttcacttgcttacgcaacagaatctgaaagcacaccaaaagacgaaataaaatattcatctccgaccattttacaggtagagcagattcaggctgaaacggtaatttacgaagcaaagctggcgcgtcagaaggctgtcagtgaattgcgtaatcttgatttgaatggtgtagcgtccgcaacgccagcaataacgccctcttccgggtattcttctcttgcagataccgatataccagcgcaacgtgtagccgctaaatcacttcgtgttattgaaatatttggtacaccacaacaaatgtcagcacgaatttctctcctggacgggtcagtaactgatgtcaaggtcgggcaaagtattcctggtacttcttataaggtggcatcaatcactggtaatggcgtctggattcagaatggtacagagaaacgccagcttattctttaatgctattgaaagagacgacacataatgtttttttctgacgcagactatcccggaaaagatatttctgatgttgtatacgtcagtatatctgaaaaagacgataaacctgttcaggtttatatcgctgataacagtaaaggacagcgtgctgttcaggcttatattggcactctgaatgttaaatatcccggacaggtaaatataacctcgacaactcttgatgttatcgcatcccgctaccaggacagcgaaaaaaggtctgattcaaactcatcacaacacttaaacagcaaccaggaaaaggtcattagctacctggcgaaagcaaacaaactgggaagttccgatttgcacatcacacctggtcgggacggctccgagttcacttatgtcgaagcacgcgtgcatggggaactggaaattctggatgtcatcccgcgtaaagaagggctggaattgctgggtgctgcctattctggaatgagtgatgttatcaaaggtacgcagtttgaccctgcaataccacaggatgcacgtatcgcagagaattttctgaagcctgtaaatctttttggggcgcgctattcgcattatccgtgcgtgggtggtgtgtacgcggtcttccgcctgattaaagatgacagcgaggatattcccactttcgaagaacttggctacatgccgcaacaaatccagacaatcaggcgaatgttacaacgcccggaaggaattatcgttttatccggccctacagggtccggtaagtcaacgactctgagaacggcttcagaagcctatctgagcacgtttggtttcaaccataacgataatatgcgtctcccccgaaaacgccttttcaccattgaatcaccgccggagggccgcattcccggcgcaatacagacggcagtcagggattccgtcgatggctgggttgacgcgattaaatccgctatgcgacttgatccagacgcgatactgaacggcgaaattcgtgatcacgcatcggcattagcagcaatcaaagcctcgatgacaggccaccttctgttgacgaccttacacgccaacgatgccctgaatattattgagcgccttgaaatggagaatattcaggccaggctgattgcagatcctcttctgtttatcggtctgctgagtcaacggctggtacaaaaactctgtccttactgtaagcgcacttatgctgaaatggcagacaaactgagtacagaagaacggaaactcattgaggaaaattgcctgccggaacaggtccggttgcgcaatcttgacggttgcgagcactgttataaaggcgtaacgggaaggacggttatagcagaagtcgtctcacccgacgcacgtttttttcagttatatcgtcagtccgggcgtctggaagcaaaatcatactggcactatgaacttggaggaattacccgtaatcagcacttattacacctgattaatcatggcctggtagatccgctgtccgcacacttcatatcccccattgacgaagataaatactcaatgctcccggaggggacatggcgataaaagatatatttgagaaactcaattcgatagaaattgatttctctggaatatcccactggctggcaaaatacacattcaggtattccagaataagtttatatgaagatttatctggaatgttaaatgatggcataaatgtaaagcgtgctcttacacacctgattgatgtagaaacagactacgggaagaaaacggggtcttctgcaacctactatatttgttgtgagtgccttaatgcactgaataacacaggggctatatcttcagcattaaaaaaatatataaaggaggatgaatatcaattaatatccagcggtgaaattcgcggcgaccttgccggaggattagttcaggccataaaaattgtcagaagtcgttctgaaatgacaatgactcttgttatgtcgatgatttatccatccgtactggtttttggttgtctggcaaacatgtatatggtccacgataccataacacctgttttcctttctctcgcaccgaaagaacgctggacaagttctatgcgattactgacagatacgtctggtttcctgatagaaaacggaacgtatattctctgcttctgcatcgtactgtttttcctgatcagatattcgcttgcgcgttatacaggaccgggccgtcagtatcttgattacattcccccctggtcactttataaaacatttaatggtgtaagttttctcttcaacatggcctccatgttaagtattgatattcccgttgcaaaagcactggaaaggctggagaaaaacagcactcaaaacagatggctactcgaacgaataaaagaaatcaggagatatgttttacttggacagtcacttgcaatggcaatgaaaagttgcggttatgacttcccatcgaaattatgcattaacaaactattacttcattctgaaaatgctgacaatgcattgatgatgtctaactatgctgataaatggctggaggaagcaaaaggaaaagtcaaatcaacaggagtctggataactgtagtatccgcattaattgttttcgcatttattgtaatgatgattactgctctctacgatgtcagtaacgtcctgcaacactaatccctaatatttttaacctctcaataaataaggaattatttattatgtcttctattaatattttaaatatgcgttctgttttttcttctctttctgcacgccgtaaaaaagaacaggacaaaggggcaacactgatggaagtgttattggttgttggtgttattgttgtacttgcagcaagtgcatataaactctattcaatggtgcaatccaacattcaatcatccaatgaacaaaacaatgtcctgacagtgattgccaacatgaaatcactgaaattccaggggcgttatactgacagtaactatattaagactctctacgcgcaaggattactgccatccgatatgatcgcagatacaactggcgcaagcgcgaaaaacccgtggggcggctccgttacaatcacaacctcttcggataaatactccttcaatgttgttgaggccagcgtaccgaagaaaaactgcatggcaatggtaaacgccctgcgttcttccagcgcaatctccaagattaacaacacttccacatcaactgtcgatgcggcaactgtttgctcatctgacagcaatacgctgaccttcagcactgattcctgatttttcatgtgcatcggataagcgccttcgggcgcttattttttccatgtttacaggaggagtattgtgcgttctgttctttatatcctgctatcatgtatttcatcattaatcttttcattgcaacccgcatattcagcgacaacgacccaatttgatgcctgctttgcacaagccgggcaacgttatctgattgatcccctgcttctgaaaagcattgccactgtagaaagttcactcataccagaccggataaatcacaacaaagaaaaaggaaaaatattaagcaccgattacggactgatgcaaattaattcatcacacatccccaacctgaaaaaacttggcgtaataaaagacaaatcagagcttattgataacccctgtctcaatatacaaattggcgcgtggattctggcaacacattttcagaaatgtggcataaactggagttgtcttggcagttataacgctggtttcaaagaaagtaacgaacagaaaagaatcaaatacgcacgctatgtctacaataaatacatggtaaggtaacttatgctaaacagcatatttaatacggcgatactttgctgtgcaaatatcgtctgtcaatgctacgcctacaatgaagtaaaattccgtttaaataaacttaatgtatcttataaaaccggcacagagaaatattactgtctgatactgacaacgcttgccgttctgtatctttcattaaaccagctatcactgattcaatctataatagtgattgttttctatgctttccttacattaatggcttgtatagaccttctttcatttctactaccacgcctttataccgtgacatttatcttctctggcctgttatatcagacatggaataacaatatattgtctggtttgttttgtgcaatgctgatgttcttcattatgctgtttgtaagactttactttgcatataaaaacggaacggaaagtttcggcatgggagatgtgctacttattgcaggaactggcgtatggtttccaacgcctgagattgcctgttcaattgtatttattgccgttatcggcggaattattttcttcactcttggcggattaaacaagcaaaaaaaatatatcccattcggtccgttcctttgtggcggaatgtttgtttactcactcgtaccgggaatattattctgaggattaagagcaatgaaaaagacagataaaggtgtatctcttcttgaggtattacttgtcatcggcataatggtgatggttatccctaaagtttatgaaaacattgaaaaccatctgaataatgttcgctggcagaatgcagcagaacacgcaaatacctataacaccgctgttcgtaattatgttgctgacaatgcatcaacactacttgctggctctttacccaaaacaatcacgccagcaacactcattcagaaaggctatctgaaatctggtttttctgaatccaattttggacaaagctacattaccggtattgcaaagaacagcaaaacatcccgtctggaagccctgacctgtagtaatggcggtcagtccctgtcagaagccggaatgcgctcggtagcaagcatgattgaagggcttggcggctacatcaacagcagcaagcaggcgattggcgcgggtggcggctggtctgacacgccttcaaattacgggctgaactgcgcgaccgggcatattgcaatggcacttgttggcgctgatttgcaggaaagcgaccgtttgtatcgttactccataaccaatcgtcccgaccttaacaggatgcatacggcgattgatatgaacagcaacaatctgaacaacgtcggcactttaaacggcaacgccgccgcgctctccggcgatatcagcgcacgtaacggtacgttctctggcgcaatttcaggaaatacagccacaaccaacggcgatatcacttcgaataatggctggctggtcacaaaaaacagcaaaggctggatgaacagtacctatggtggcggctggtatatgtccgattcgtcctggttgcgcagcgtgaataataaagggatttatactggcggccaggtaaaaggtggaactgtacgcgctgatggacgcctctatacaggcgagtatttacagcttgaaaaaacagcaacggctggcgcttcctgctcccctaacgggcttgtaggccgcgacagtacaggggcgatactttcgtgccaatccggtcggtggtctggtggcaataaagtgaactactccgcctgtaagtggtatcaatcatctgtagcaatgaatcacttcattggcgggaaaagtggaggatctatctactacaaacccattcaatgcccgaccggatttatcatgacaggtacacgcatgtatggcattggtgatggcgttgatgaggaacacgttgatgcttattgttgccccttcggttaaatcccagcaccaggaagattcaggcatgtaacagtaattgtgccgccggactcataatttccccacgcataattattcacataccaaaccttgttttggtcggagtatacctgctgaaacccaccaaaaggcgcaccattaaggtatgtccacgaacagtacgcatgtacgccaatgctcagatttcgggtgtttttcccgatattgtacgtactggtagtgaagttcacttttgccgttgtccagataccggattggcactggcccccgtgccaatccggtacgtggagaagggcatcaggtagcactgttctgacaggaaaaatagcaaatggacaacagatcccattgccatctggtttttctgccagccagtgtacctggagtgtcagtaatgcagaaaatccgcacgggtggaagccgaattattttgcggggtcagttgcaacctatgatgccaatcgaattgtgaaatgcggcttctatgacgaatacaacttttatggcggtactcaccgaactgacctgtcggggaaatgtagttacatcgtggtttgccagtgataagtatcgtcactggcaaatggcgtaaactgtaattgaaccattttgatcttcggtcgtgtcgcaactggcagtccatgcattgttgcctgaaggcatggaacgcgtgagccatataaatccggtatttgatctgcattgaccgcctccaccaatgactttcttgccagatggacatgttgccgttgctccaggccaacgccacgcagtagctgaagcggtaacaatttggctatcacctgcgccaatttttttccacgtaccggattggcacggaggccagtgccaatccggtgtgtggagggcattaggtggaaagctcaaggttactcaactttccagcactggttacttggggcaatttgacttttgtgccattgccagaatgggaaatgctgaggattctcattactgccaggtagtcgagagtccatctggttcacgaaaatggtacaaatacgagcacaagacaggttgtattgcgtcctgtgtaactctcaattaagtttggtatccaaaaactgaaaatacccctgagccacaagagtagttttgggccggataagaggtgatctgataagttgcgccagcagggacagcaaaagagatgaatgctgtcttcccataagatgggttgttgctcgcatttgtgctaatcaatacccctgcaacgtatccctgcaatctggatgtgttagcgcaatctcccccggcggaaccaccattccctccagaggcgtaaacaaacagcgtaccacttcctgtattgcgaccagtaaatgatcctctgtgtgagccaagattactgtaactaccgttagaggaaccggaagttctccacacaccggattggcacggtgatattgcatttcgaagcaagaatctctaccttccccccttttttgtctggaggggatatgtttcagaaaatcaaaattcgcaaaatgacaatcagccgggcgctggacaaatacctgaagacagtatccatccacaaaaaaggccatctacaggagttttatcgcgtaaatgtgattaaacgtcaccctattgctgaacgctatatggatgacattaccactgttgatattgccaattatcgggatcaacggttggcgcaaattaacccacgaacggggcgtcaaataaccggaaacaccgtccgtcttgaacttgccctgttgtcatcattattcaatatcgcccgtgtggaatggggaacatgccgcatgaatcctgtcgaactggtcagaaaacccaaaatcagtagcgggcgcgatcgtcgcctgacttcaggagaagaacgccgactttcgcggtatttcaaagaaaaaaatcaggctctttacgtcatttttcatctggcgctggaaacagcaatgcgacaaggtgaaatcttgtcattgcgttgggaacacgtcgatctgcaacatggggtagctcatcttccaacaaccaaaaacggtgctccacgcgatgttccgctatccaggaaagcccgtaattacctgcaaatgctgccgacacagcttaacggtaatattttttcttatacctcttcgggattcaaaagtgcctggcgaacagcacttcaggaactgaagatagaaaacttgcattttcatgacctccgtcatgaggctatcagccgatttttcgaacttggtacattgaacgtcattgaggttgccgctatttcaggccatcgctccctgaacatgttgaaacgatacacacaccttcgggcttatcaacttgtcagtaaactcgatgcccgacgcaagcaaaccagcaaaatcgctccctattttgttccctacccggcaacggtcgagaacagaaacgggcaagtcgttgtgactctgagtgatttcgacctggaaacaagcgcagccacaaaagaacaggccatatttcatgccagcgtgttgctgctacgaacactggcacaagccgcccagcgaggagaacgcgtccctactcctggcgaacttcctacaaacattgatgaacgggtaatgatttgtccattaacaaattagaggattcacttatgatagaacaactacagagtgattttttattctggatatttatttacttcctgatagtaggtttgcttatcagaaacattcatcttaccagaaaaattaaatccatcgaaaaaaacaaaatgttcccagcggaggaatatgctgtcctggacattgaacagcatatgtccaataaatatattgggcggctagtaacccgttttatgaagagaactaatggtgcacctttgttaattgtgtttccagaatacgataaaggagacaacaatgaagacaaaaattctccaccattccaacttgtaaaactaacatccaacatcaacaatattaaagaaatttattccaatgatgacttaaactgttttctgaataatatttcggcacaaaaaaatttatatacaacgcactctggacctagccaggcatggattgaacatgcatatcctttgcaacaagtaactattctcttacaaggcactcgtcatagtgaaagggaagatataatcagtcaacttgagattattctttccagactaaaaaatggagaaaatacaggttttgagcatgacgatgattttggatattcatttcagtatgatgccgcagcagtaggaaaatcatcatttttcgatgaagcggcaggaagaaaataagaataacgctctatccattgcacagacaaattaacgttaatcttttatgaaaatcttattaacaatatttatttatctgcttaccgcttttcagtctgcaaatgcaggtggaataccttatacatttaaccagaaaattcttcaggggaaagttattcgcgttctcgatggcgacaccatagaaattaaaacactacccgcaaaaattgttgtgtatgaagttccgatccgagtccgattgataaacatcgatgcccctgaaaagaaacaaccttttggacgctggtcaactagtcagcttaaaactctggttgcaggtaaacaggtgacagtctcttattcacataaagaccgctacggacgcattatcggtcatgtgttcacgacgaacggcacggatgccagccgctttatggttcagtctggcgctgcatgggtatatgaacgttacaacgtggatgagtcattaccggctctgcaacgggaagcgcaggaacaaaaacgtggtttgtgggccgatgcaaatccggttccaccgtgggaatggcgtatcagaaattaagggggcaagaaaatgcattcttcttttggtttgccatgattctgtctttttatctttgtgcaatattaaaggcttctttttaacagggggcggcatgtatgtaattaatcaacagacaagggacaataatattcttacgttgcatgatgtttttaaaatctatcaaaatacaggggggcttcgtcttgtaaaaacagaggagaatgaaaagtacatctccattatcatttgtggcgtttttcgtattagaaaaaacaaaaagaataacaaaatcactttgtggggatacaagctaagagataagcacactggggtatggaccagaagaaattcatttcctggtaagatttttttattctggtctaaaaaatctgcatacgacatggacgactggttaaaatatgcgattagctacatcatcaaatcattgattgaggctggatattcaattgaagacaaactctatttgttacgcattggagaggaagaggaaaacagcgagagtcgttatatttccacactatatccatccaatgtatattactcatatgagtatggaatacatgacattgttcattgccttggtaaaatagcatcattcaactacccctataatacacgatatatcagcagacatattttactcgcagagataaaaaacaaaatttatcagagagcattaaaaattataggggtggataatgaatttaatgcttcaaaagcattgagtaaagctatatggataatggtagataaaaagatatttgcacaatatgccagagcttcacattgttcgatagcttacaattcaattcgtcaggcattatttgaggactatctggatttttcaaagcgaatccatattgtgaatgatatggattttttcggattgtggcctatggttggtcgtctaagacaacaacataaaaatggtcagtttatactatctggaaagacaaaagagttatatgaaaaaatcagttttccctgcaaacttagttatggtgagttcagaagtttacgacatgttagtttgtcattagtatatgctttaaatgataaacatgataatgcatcattcagatttacagtcagattattacgccatccacttatcaagaactatcctgtgagagcaatttactggattatcgattatattagcattcgagcttactcagaaaaagaaaatgatatttatcgtatatgctcaaaatggctagaatatcatcgtgatttatttaaaaacattggcttttatgaccgtaatactgaatccaggcaaacatcacgctgggaaatggaaacgaatcagttgtgtcatgcaattgactggttgttagcagaagaacggttaattcataaaaaccaggagtggccttctttctggagactatctgatgaatggacgcgacaagtgaagaataacgttattcccgtaatcccaaaatggaaaggaactgggataaactggcagaaagttgataacggtgtaaatgaattaattacatttgatgctctgtgtcaggaaggtcaggagatggaacattgcgttgccagttatgcagactggtgtgcatctggagaatatattgcaatttcagtcctgatggataatgaaagagccactcttggactttcacgaaaagaacatgatttaacctatcagtttgaccagatgagaggtattcgtaatcaggctgtttccagaaacatgctaattaaaggcaggcatattttaaaaataatcaactcatcactaaaaagataatgagtcatcgcatctcattacagcaccgatgactgggtgtttattctttctgaatacaaaaactgactgaaagataaggaaagaaagttttcttacctgtttgtcttacgcaatggtgaactggttcaccatgaggtcaacaaatcagagcttctttgagaggtttaacatgcaatatgcattgcttgatggatttgaacgaaagtttttgctggatgctcttgaattcggtgttctgaaggactggaaagaaaatccggtaaaagaacttcctgatattgatgaatctgctcaccccttccatgtctgttatggtggatatttattaaatcctggtgtttcagattcagatattagcagaaaaataaaagaccagacaggattctggctggcagctattgatgatacccgcatggattgtcattcaatagcttattatgatattcacacactccctctgatttcgtgtggtcatcaaaagatagttccttttgccgcgttaataaaagctgatgaatgcatcatttcaaaaatttcttcgtattctggttttgccgtaacagcctttttgagaattaaagaccaggatattgcaactaatatacttaaccgtgaggggatttttgcttttaatggctgtgaacgcagattcagacatccagtaagtgaagataactggcaacaggcagtatcagaagaacgtgctatccgttgtgccaaaagattaattcaatgtaaaggataacaaaatgaaactttttatcgcagaaaaacccgcagtagcgaatgatattgttaaggcgcttggtggcaattttacccgtcatgatggctggtttgaaagtgataatactattgtgactaactgttttggtcatattatcgaatcacagccccccgaaaactataatcctgaatacaaagagtggaagattgaaacactccctttgcgtctttatcccgtaaaataccagcctgtagaaagcgccgaaaaacaggttaaaacgattattgagcttatcaggcgtgctgatgtgaccgaaattattcatgctggcgatcctgatgacgaaggacagctacttgtcgatgaggtcctggaatatgcaggcaacacaaaacccgttaagcgcgttctgatcaacgacaacacccttccggctgtgaaaaaggcgctggcaaatcccaaaaataaccgtgacttcagaggactctatctcaaggctctggcgcgttctgtagccgacgcgatatacggtttatccatgacgcgtgcttacacaatcccggcaaaaactaaaggctataaaggtgttttgtctgtcggacgggtccagacacccgtgcttggcctgattgtaaatcgcacccgtgccaataaaaatcataaatccagcttctactacaccatgaccggacattttcaacgcggcgctgatgttatcagggcgaactggaaacctggtgagttcgcaccgctgacagaccgcaaattgcttgataaaacctgggcgaatggaacagcaacatcacttgcaggaaaaccagccacagttgaagcggcagcaacagatgataaaaaaacggctgcaccgttgccctttaacctggtacgacttcagcagtacatgaacaaaaaattcaaaatgactgctcaaaaaacgctggatatcacacagcagctacgcgaaaaatacaaagcaattacttacaaccgttcagattgttcatatctttcagacgaacaattcagtgaagcaccacaaataatcgatgccctgaagtcggtgtttgatcagccaatggatattgatacgacacgtaaaagcaaggcatttaacagcgcaaaagtaacagcgcatacagccatcatcccaaccgttagcgtaccggacgtaaacgcactgagcaccgacgaacgcaacgtttacctggcaattgcacaacactatcttgtccagttcatgcctgaaaaggcatatcaggaagtatccgtcgccattcagtgtggtgatgagtcgttttatgcccgtgccaggaaaactacagacagcggatttgaagcgtttcttggtgtggaaaatgccggggacgatgaagcagaagtcgaaaatgatgattccgcttttgatcttctctgtaaaattcgcacaggagaaacagtgacgacaaaagaagtggttgtgaatgagaagaaaacaacgccaccgccattattcaccgaagccactttacttgccgcgcttgttcgtgtcgcagattttgtcactgatccagtgattaaaaagttactgaaggataaagatcgggataaaaaagacgaacatggcggtattggtacgccagctacgcgggcttccatattggaaacactgaaaaaacggaactatatcaccctggaaaaaggaaaacttattccgacagataccgggtatgcgcttattgatgctctgccggatatagctgttaatccagatatgacggcattatgggcggaaaaacagacactcattgaaaacggagaaatgaccatcgaacagttcgttgacgaactgtacaatgatctgataccgatgatcagtaatgcgaacagtgctgaaataaaagtttcccccagcgcgccgtctggtcagtcacaacgcctgtcctctccttgtccttcctgtggtaaacagattgttatcaggccaaaaagctattcctgtacaggatgtgaatttaagatatggaaagatttctgcggcaaatcattaaccgataaacaaattgaaacgttaataacaaaaggagttacaagtgaattgaaaggtttcattagtcaaaaaacaaacaaagaattttcagcaaaagtaaaactggttgacaaagcaaccgggaaactgggatttgagtttacacaaaaaagtaagaaataaatccagcagtagaaatcaaacatcgttgtagctactataggacaaggatgttcttcaggaattgtacaatgaaaacaaaacaagactggctctttcagttaagacgttgctcaacactcgacacacttgaaaagattattgaaaaaaaccaaaacagcctccccccttctgagcttgagtcgtttaatgccgccgccgatcacaggcttgcggaactcacaatgaataaactctacgataaagtccctccatccgtctggaaatatgtatattagttttcatctattaatattagatgtttgatcgacacaaacatcagcaatccctatacacctttcatagaatgaattgaaccctgtatatagcctgtctgaaatggatatctggcaggctatcttaatagtgttataggtggtatgaatgtttttcctctacgagacctacaatttcttctactacctgataaagttaattgtcattcagccacaatatatttgtgtctatatgatattcttttttttcaatgcagggatagcatatagcatcaccaatgatatcgaggatcaagtatgtcgatggcttttattcgtaagtatgttacatgctctgatgattccccccgcagttatcatgccacttatcatgccaccacaggaaatacttcaggaaacagagaaaaggcaggaactacatgaatcaatacccaaaacatgcaaattaaaggcactggatgctcaacaaggtggtttattcggcgttgataaagatgaatgggtattccctgacaataaatcattctatctgcctgaaaagtaccgtccagaaaacaggattacggaactagccatgatgaaagaaggataaagacctatgaagatattcaaattgtttgttctttgtatcccccttctgtttagtctttttttcgctggctacggcattttgtcaaaaaatccatttgaaacactaccgtgtctgtccgccagtgctttttgcctttttctgtttgacatactgaggcgatcatttatgaagtgaggtgtcttgatgttaacgttgaggttgagaaagttttgttggttcttataattatagaccggattaaatcatgaaagaatacgaaaaaacggctttaatatattccttaaaggaaagcaatacattagttcttcggattatactaatctctattttagttgtcggggtgatttcaggcgcgatatacttatataacttggcgatctcgttgtttgattcaaacccaacgtctgtgcaattcaccttttgcggagtaggctgttttattgctctattacttcaatggatatctaatgttgatgcaaattacagagaaagaattggggagcaaccaagtacaataaaaaacattgtacaatatttatttgcagccattattaccattagtttcattacaatggcattaacagccatattagtcttaaaagactcgtccaacatatggctcaacattacttttattgcattattactgtccatttttgtagctattatttctgtttggggttgactttttttcttaaaaagcccgaaaaccgggcttttttcttaattagtgcatgtcctgtgaatcgtcacgctgctgctgcgattcctgatgatcttctctggcctggacaaattgttttccaagagcatcttctgccatttcacgagtgaatccgtgattaagcaaatcggattcggccttctccctttcgaacttcagtccttcccctctgaacttgtcctcaaagcgatcaattgcctcaagaatcttgccgtcttccggcgtgcaatcccgtccctgtgctttctcaatttcatgacgctccacgcgttcagcatttttcattacagcgtcaatcccctgagaaatatgttcagactcgacgcgataaatgacagtatcgcgcttattgagatcatgtagctcgcattcaacccggccccactcaatagcatccttgagagagctgaaatcttttatttcagcattcagaccttcatgtgttgagaaatagacataatccttctgttgttccagtttattcacattttcaatagcccttgtactgaaatggatacctgtaattaccggaacacgagccgatgtttggtcccccgttaaaacttcagaaggtgtttttccagtgatcgcggcaaattgctgctccgtaacatccactctggcaactgcatcaccacgctctaagccatgcttaccagcgaccgcaaggcgataaagaccaccttcccccctggtaatttccgcctccacaacgatatccccattgcaggaactgaactgagaacggtctttaaccaggaagttttcaagcccggagatcatatgctcgttagctgaaatactggcgagtatctcttctggtgattctctggacgaatcccccgcctgttccatcactgccatattagcgtcattaacagcgtccttaattcctttaaaggcgatttcttctcttgttacaggtgtgattaagatatcatcctggttaagcccgtgctcctgaagcatcttatttttatattcagatgcgtcgtgcaatgactcaaaagtcttaatatcttcactaaactcatccttcgaaaaagaaaccgcatacactggagtacggtattcttcatatgaattggcaattatttcaaatggcctatcaaacgttactaatgccccctctggataagaggataattcatcggttgagacagttttagacataagcacaacagtatcaaaaccatcaccatttaaataattgctttcatatttttctattgcagaagatttgctttcctcataacactgaatagccgcatctttagaatgaaagacgataccttcattcaaatcatggaagcgactaaagtttatacaataaatttcctgtttattatgcacctgcgcagtagcctgatcgtgttgagtagtaagctgctcctgaatcagagcctgtgttctgtcaatacctaactcattcacaattttgcaaaattcttttgcgtcgttttcattatcaaaactggcaacgtcaaaaatatcatcgctgtctccaggtacatgtcccagcacttcccaaatctcattttcatcgctatccagagatttcaaatagccaaattcaccatttgtgcctttactaagcatctgtgaatccagggtgtttgccctggtaataacaccaggatcatatgaagatgtggcctgctctgcgacctgtgcttgctccgcgacctgtgctttctccgcgacctgtgcttgctccgcgacttgtgcttgctcggtggcctgtgcttgctctgtggtctgtgcctgttcggtggcctgttccttcaatgcatcacctttctctattctggattcggactcctggctattttcctgtgtttccacctgctcaaacttattaccctgaagttctgcttttaattccagcatcatctgttgatactgctccgggcgtaaaataatcttcatgtcctgctctgcggcaacttcagcgcacatttttttgaaatcttcagagccggtaagtttgagtacaccaccaaacttttccctggaatactcaagcattattccgatctcttcttttgagggatttttacccgcaacgacaaagttccctttgtcggtaaagacaggcttttccgattcctgatcgcgataaacaatcctggaatcctgcttatccatcacaagatcttttagtttggtgttaacctttttcgcctcttctaagcggcgctgggaatccaccgctttctgaagcgaaagttcgggttcgtcagcagaaatggcgttgatttcatcgaagttgagatagcttttgagacgttcaagggctttcatttcatctttatccttatgccagtcagcatgatattgacgaataatgtgtcgcccatctgtgtcgagttcagaaagacgctcaagtgtggttagttttttgtaaacaatcacacccacggcaatatcacgctgttcacgtggtattaacttcaactcgcgtctcatctctcgcagatcattatacagcttgccacgctcaaacctgatagtatttcgtaatgttttttcagataaattcagtgagttaagacgctcacgagcttcatgatgcgtaaggcgtctgtaggttggatagcgcgtatatggcgtgttttctaactgctgtgaataaacttcaagcagaaaggatttcgcatctttccaggcaagattaatatgctttgtcagaaaatcagatgcgttcatattacgattccccacagaaaaccggggggaaccgtcctttgctgttctgattttatgctgcgctggaataatattaaaacgctcggcggcagaagacagaaacctgacaggatcaatatttctgcgaatttctgccatcgttgtaatttcgtttttctctgccgcctcattcagagtctgaaacatcgtttcacacaaaaaagaagagcgttcaagactttttattcctgactctgtgaattgtctatcataatcccgtcgcacatcctgaccaggatgttctctttgcggtaattgctctgccagatcacgctgcgaaatatctgacaatacactgatagagtcgggtcttgtgaatccattgattccgtaaaccataccgcgttggggcatacgtgacaatccgactgttgcttcagattgacggattctggcaaactttttaggacacgacttgtaacctcccgctcgtcctgacgtttgctgagaatttctttcgttaagtttttctcttgagtcatattcttttatcctctctttcagaaattcaatctgctctgcttcagataaacttgtatagtccttacgaacgctggcgttgagaaaaacatgtttaatctcgtgactggttttgtttacccaggtattgagacgtttttctatttgcttaggcgtaggtttttgaagagtcaactttccctcttcaatatagtttttacgaaacaacgggcttttcagattagtgaactttttatctcccggtaacttaacagcaatatattcactggcctttccttcatttcttatcctaacctcaccatattctgcaacaatctgtttgaatacagcataatcacttactttttctttttcaattcgataattcaattcattcttaaatgcagaattacgctctacatcaagatctgcttttactctctttaaaataacactataatcactattttttctcggaaagtccttcgggctggcaagattatatttattgttaatatgctcctgtattgcatctagctgttcgatagtatgacctttccctataaggccaacaggatcaagtttatctcctgtaactagattaacctttggaatgacaatatgaatatgaggctttctttcaattaactctcctgtactattatcctgaatatgccggatttttggcaaatgtgcttcagcatagaaagaatattcttcaggatgataagcattcatcaataattttttataatcatccacaaccgcctttaacatttcatttgatacgtgactttcatgaaaagacaacgtaatgtgcaaataacggtcctgtttgttgtcttcaatagaattgataatcttatctgtagtctggagatcaccatcaagaacaacacgatgatcaagttcatcacgtgtgtactgacgttctgctttgcgaccatttatcaggtaatcaacaataccgtcattaccaccaccatatctgacaatcatttggctatctcctgaaggcgatcacgaataccaatcagcacatttaaaatctttttataaagcgcctctgatataataccctttaaatgatctgagtttaagcggtgagctatctggttaatattattcccagcccaacttaactgagaaagacaccgtttgtattccgggatatggcgtttatctgatgtgtagttttttattttaccaatagtaagcagcctgaaaaattcagacttactaatttcaagctctctgattgctctgtcaaatggagcatactcttcttctgtaagtctgaatgtcacatgaacacttttgttggcttttttcttcataagtcctcaaggttcgtagaaccgcactagaacggctgcgccgttcggggttgcaaaggggcgtcccctttggcacaagcattgtaacatgcccggaacgggcttgtgtacaaaggtgtaggctggagctgcttcgaagttcctatactttctagagaataggaacttcggaataggaacttcatttaaatggcgcgccttacgccccgccctgccactcatcgcagtactgttgtattcattaagcatctgccgacatggaagccatcacaaacggcatgatgaacctgaatcgccagcggcatcagcaccttgtcgccttgcgtataatatttgcccatggtgaaaacgggggcgaagaagttgtccatattggccacgtttaaatcaaaactggtgaaactcacccagggattggctgagacgaaaaacatattctcaataaaccctttagggaaataggccaggttttcaccgtaacacgccacatcttgcgaatatatgtgtagaaactgccggaaatcgtcgtggtattcactccagagcgatgaaaacgtttcagtttgctcatggaaaacggtgtaacaagggtgaacactatcccatatcaccagctcaccgtctttcattgccatacgtaattccggatgagcattcatcaggcgggcaagaatgtgaataaaggccggataaaacttgtgcttatttttctttacggtctttaaaaaggccgtaatatccagctgaacggtctggttataggtacattgagcaactgactgaaatgcctcaaaatgttctttacgatgccattgggatatatcaacggtggtatatccagtgatttttttctccattttagcttccttagctcctgaaaatctcgacaactcaaaaaatacgcccggtagtgatcttatttcattatggtgaaagttggaacctcttacgtgccgatcaacgtctcattttcgccaaaagttggcccagggcttcccggtatcaacagggacaccaggatttatttattctgcgaagtgatcttccgtcacaggtaggcgcgccgaagttcctatactttctagagaataggaacttcggaataggaactaaggaggatattcatatggaccatggctaattcccaccattgacaacccacaaaacaacccacataatcacccacacaaacggcgagcaaattgctttaaataaggtattatgccaatgtaggaggtagagagagagaggaaatgtaacaaatgaaaaagatcgagagtttattatctccaatatgcgaggctataaacgaaacaaaatcgaaatcaaaacaggctgtcttcaatatgtatttgcaaaatatacttgaagcaaagaaatattatacatgggagcaaatagctgattacataaacaacaacaccaagacagaactagcccaaaagacttatataaatatgacagagagggctaaaaaaagacaaaaatgcactgaaccaaaagaacaggcaaaaaccatagatgtaattgttcagaatgaagctaaaggcgatgaaccgagagggggggtaaaaggttttttttcaaacattagtgagaacaaaaaagaaatagagcacgatccaagtgctacgaatgaaaaatttataaataaatatctttaagtaaaggagcattataaatgaaaaactcaatcaatttcatccttcagggtaaaggtggtgttggaaaatcattcgcgaccgcaatactggcacaatactttattgatgaaaatcacatggataatatcgtagtcggtgacacagacccggttaatacaactacggttaaagtaaaaagattaaatgcagatttgatacaaatcactgaaaacagcaaagtaatacaatccaaattcgatccaatgttcgaatcgatgctgaccaatagtcagaatacttttgttattgacaatggcgcatctacatttttaccgttaattcagtatttcaatgataactgtgttatggacatgtttgaagatgtagaacaagacgtttatatccatactgttatcgttggtggacaagctcttgcggataccttgcagggatttgaagaactgaaagaactggttaaaggaagtaaggtaaaacttattgtctggataaatgaatttcagggtattccagcacttgaaaatatcccattaatagaaactaaattcattgaaaaaaacaaggatgtaatcgctggcgttgtggttattcaggacagaaaaagtgatgcctttgcctctgacatcaaagagctaacagaaaaatcactaacactgaaagaagctcttgagtccgaccattttggattaatggctaaatcacgattaaaacgagtcttcaatgacatttacaaacaattagatagcatctatgacgatgaatacggtgaataatatgagtacagttaatcagccagaattaaaacagcctgaaaaggctgtttccagtgaagatattgataattttattgttgatgtattcaaggagacagggcataaaatatcaaaagatgatccagttatttcattaatttttctgaaccaaaagatacaggaaaaattcagcaatgagttacaagctaacttcacagccctgtctgagggcttcagacaggtcgtttcatctgtagaaaatgactatattcaaagattcaagaatattgttgagacgtgcggcgatctggataatgaaataaaagaaaaagtagaagagggaaaaaacgatctaaaagaaacaagtgttgaggtaaaagaaaaattaacagatgatattattgaactcatatctggaattaaacgcaaccaggaaaaaaacaacaaattatatgaagaaaagttgaagtcattatctaaggctgtaaaacccttcagtacaagaacagccattgcaatttgtgccttgtgcacattatgcctgtctgcggcattttctggcgcaacctggtatgttgcacaacatgaaaaagaggcaagcctgcgcttctatgcaagagcttttcttgatatgaaaaaaataactgaagagagcatgagaaaattaccaaaatcagaccagcaaaatataaaactcaaactagacgaaattgattcaagaaaaccatagatatgaaaaggagtcactaatgacaacttttaccgacgacgacaagaaactaattaaagaaatcagggagcgaatcggcagcctggacgtgcgagacaatattgagcgtcgggcttatgaaatttctctggcatcgctggaagcagagccagttatgttctgtatatcaggacaaaatgtagattcagaagaacatgtatcaaccagcaaagcggttgttgatgcctgggttgaagaatggaatcaggttgacggaagtcctggcgaaccactgtacaaaactatgccactctactgtcacgctgccttgccagcgccggtagtgcctgaaggactggttaaagcggtgcgtttttatgagcaggtaaaaaatgagaatccgccagttgggactggtgcgtggaaagacgctgttgactgggtgctcgaagaggcttgccaggctgtaaatacagacatcaaaggatgaacgatatggcaaccaacaatcgtaaagccaagatgctaatttcccgtgtatacagactttgctaccccagccagtggttgagagttagcaatcgccgtgtggtgttgttctcattttctggaattgccagagagggaatcaaagataagcgcagcgcggcgcaaaaccgctggaaaaacaacttgcgcactaaaggagcctaatatggctattgccgcaagttacaccatgcatctctactgtgattgtcgccagtgtacaaatggtaaatatcagtcgccagacttcggtgagtatatcggtacgtcatgggctggctgtgcaaaagaagcacgtaaagatggatggcgaataagcgccgacaaaacacgtgcttttgcgcccggacataaagttttgaggattaacaaatgacaacatttaccgacgacgacaagaaactaattaaagaaatcagggagcgaatcggcagcctggacgtgcgagacaatattgagcgccgggcttatgaaattgctctggcatcactggaagcagaagcgccaaatttgcctggtggtttcacaattgaagaagcaaaagaattacacgaaaatctggtaaaaagtcacgtaagcaaggctttaagtggcgaaaaaatgaaaaaagaaaatcgtgatgccgatttgcgctggattcatggcgtaatagttcaggccgcgtggtttgtgaaagcatcactagggcagaatgcatagtgcgtacctgcttttctcctggcaacggtggatcttccgcttcctcgtcactcgctcgctatgctcggtcgctggactgcggcgagcggttagctatcaaaaaaaatccccgcacaacgcggggatagttttatttatatgcaagttcatgacgtgccgcctgagccagaaaatggctacgatctttgtatacgccgccactttctctcacatatccatcaatacgacgaatcaatacatcaggcaatgaaatattaatacgttgttgtttgccctcaatttctgacaaatcaacatcaattacaaaccagctatcacagtggttataatttgggttggcggaataagtcaaacacccttcatcatgaatatcatcaacagaatgagcaccgcttattaccatctcttccacgattgctaatatcgcttcacgcgccattgcgggtatttctgcctgagaatcagcagcagaaacacatccaaaatcaaagcaatcaaaaaccggaacggtgataccgtatgctgtatgatcatctttcggtgtttcgacaccaacagaaaagaacatggctacctccaaagtcggcggggattaaatccccgccatttttttgatcgatctgacagtacctagcggcaagtcctttttaggatgaggaacaggaaaagtttttcctgttattggcgaccaccatatctggtgactgcttgccttatgccgtttcaactcgcaaccagcagctatcagttctttcaacaggtcagcagatttcatatgtcctccctaacctgaaaacaattatacacacgcatacacacaaaagcaaattatttcattcgtatgacttatgaaacacactgtaaagacagttcaatctttacagtgtaaatcatttatccagttttatcgctatgcatgtgatacatagaaaatcatatagtgttttactatatgatacctgattgacacttttaactgcacatctcatcatttacatcgtaaagacaaacatagctttacaatgtaaagctatataattaaacactccgtgtccctgataaggaaaaaaaatggctcaaccaaccccagaaaagatactggcaatcatagatgatcatgatcgcgcacaaaaaaaacaacgcaacaaaaacgtcttcatttatttatgtctctgcttggcaattattggagtggtcgcgcattcctttatatcaacgtttcgtcttgatggtgtagccgtccttacaattcttttgggcgtgtcagcaatcgcattttttctacattatgtagaatcagggaaaggccagattcttagcagtgaccgcatattgtccatactcgctcaaaccaaagattaccccacaattcgacgtaaagttgttaatcgcttgctctccggttcaaaactcacgggtaaagatgaagagtacatattcagtgaactgaaaaaggctgaacaaagcaacgaacgtgaaaagagattgcaagcaattaaagagtatacatcgtaatacaacgtaaagcatcacttgtaaatacaacacactacatcgtaataccagaaaacaccaacgccagcgagcaacaaaaaggggcgattaagcccctgcgcgatgattaatgacttctttttccagtgcctagctctggatcaagcctgacgttaaacacacctttaaagggcgcgtcaggctcctttccgtcctccacacaggactgtaaatacaaatcaaccgatgttttaaattcccgttccaggtcagctaatgtttctgcctcaaaagtcaccagatctcgaataaatgccagctttccatgcaggatattattttcaaaatccggctcaactgtacctaaatatcctttatattttaaatgtttcataaaaccccagcctctttcaagaaaagttatcagatagaagggtgaaagaaaataccagggagcagcgaggccacatacccctaagcgcagcgcaaccgccggaaaacgcaccacactgtaaagacaataaaatctttacaacgtaaagctaactatgtaatacaacgcgctacacattgacatcctccacgccctaaaggacgtggattcctacgacgttcaggctgtcgcctgaatcatttcggtgggttcctgcttcaacgagcggcctgactgcaccatctctccacaggcaagaacggcgtgccccgccgctaaaatgttacgagcgccatttacatcggcgttcgctgtatatccacatacctggcatctgaattgactttgtgacaggcgattttctttcgctgtatgaccacagcacgtgcaacgctggcttgtgtacgctggcggaacagcaagcacctgaccgccacgccagagctgcttgtactcaagctggcggcgcatttcataccagccctgatccagtatcgaacggtttaaacctgattttgcccggacattgcgccccggctggctgaccgtacccgctgctgactttgacatgttgctgaccttcaaatcctcaatgactatcattgcgtggtttttgctgacggtcgttgtgactttgtgaaggtagtccctgcggatatttgcgatacgggaatacagtcgctgtattttgcgtttctgcttctgccagttgttgctgaatttgaccttgcggcttaactgtcgctgaagtctcgccagcgtcttctggtttttctgaaaactgtttacaggatcaaaaatagtgccatctgacagcgtggcgagtttagccacgccagcatccagcccgaccattgatactgaagggtgaaccggagttgatacttcactttctgtctgaatactgatgtaccacttaccgcaggactgactgacagtgacatttttcacaacgcccgtgacctgacggctgttccggtagcgcatccagccaagtttcggcagaaaaatacgactgttttcctgatcgagcttaacgccctgcgggtagcggaatgcatcattctgtccccgctttttgaatcggggaaaagccgcccgcttctggaagaaatttttgtaggcccgctcaaggtctttcagtgactgctgcaatggctgtgatggggcatctttaagccattgggtttcagtggcatttttccactcaaccaaccacgaggccatccttgggtaaggaatatatttgttccctgcctcatggttctcattctgaagcgccagagcacgattgaaaacgaaacgacatgcgcctgcgaagcgcctcatttctcgctcctgttgaccaccgggtcttaactggaatttaaatgcctgtagtcgtttcattcgaccattttaaacaaaaaaagccaggtggaaaacctcgccttatatcctcgccctgaaggacggggttttacggcgcactggataagaaagggagagcattacactctccctatatatgactcaaactaaagcattatcccggttatgcgcccaccaaatgatttcgctaataatccatgcttctatcgcgggtgtttttacaggttccccatttacaatgcggtttgcaagctctatcatttcacatactgacatttgagaatctccaaagatgcatctgtcatttggtaacaggctgccccacagcctgttaccaaccccaaattagtatttgctgattactttaccctccttaatcatttttattagttcctgttcagaatattcttttccgtgttccaatgtggaatatatatcgccaatagtccatactccacactttttaatttctgcatttagccaggattcatgcagaataaacaacggttcgcaatcatttcctttttcataaacataaatagattcggtatcatttccagaatcagaagtaccaacgactttttctatatcgaaatgtttttttagaaaagttgtgaaatgcattttcatgctcctgccgctgagcggctttggtggttggggaccatcccctcccgatgtgtttataataggtcagaactgacctattatcaagtatttttccctccattcttcaaaaaaaacaccatcaaatacatatagttatattcatgtgatgcccgacagggcatggaaggggcgaaagaaaataccagggagcagcggggccacatcgccccgaagcgcggcgcagccgctgacgaacataccaggatgcacagggccatcccttcgccctgcaaagccagaacagaccaacaggccatgatcatgctgatttgcgccgcagaatgccgcagttagcgcgagcgacagcgagtttacgccgtcctggtgcattacagcagggcggggcgctgtactgcgcgtgtgagcgtcagcgagctacgggcgcaattgctcattgttcaatgcaactggggctattaagtccagccataaattcagttatggtttttgtagcttattccgtgatttcgtcatacgttaattctattttcatcttaatattccttaattacttccagaatcagaattctttttattccttttacaaagtacataatcagggtgttctccagctaaaagcagaagaaatttaaactctactggtgtaagtgctgtaccgcttgcagttccgacaggttcttctttgcgacgccaggtacgcggactcatgctaaatatttcggcacattctttctgtgtcaggccaattttttgccgcagacgtttaatgttttctggtgtgttttcatttggcattttttccctcactcatttcctgaatcatcatagaaacaatttctttatcattctctcttaatccgtcgctggcaaagtcgatagtgtcgaatgccttctcatgaaaaacaagatcggcaacagttttcaccgttgctttcgtttttcctaaagtcgcagacttagaaaaagtttttactcgcttcaccagatgaaacgtatcaccttctttattcagataatattgtctgtcaccttttcttatcttcatattgagatagtctccccttttaacagtaaaggggcatatagcccctttcttttaactttttccggtaatcaaatcgacatcttcctgataaagctccccaagaaccggaacaacgccttttttataatcacggatattatggcagtctgtaaaaatgacgacataagcctcgcctgttttttcatgtttaaggcaaattgtgcaaagcgtcacgcgcacaacagaaaacacatgaccagttgtagagacgatagcaggaaaagtagattgtttcatgtttaactcctgccgctgagcggctttggcgattgggggccatcccctctcaatgcattaataataggtcacaaatgacctattatcaagtattttctagacgagctttattgaaaaatcattttcaataaattcatctaacatctttaatataccagctttatttacgaaatcatcctccataatttcgatacttgctgatatttcacatgtaaactcaatgctcctgtcaaatcccgcaatcccagctaatgcagacagcatatgataattatcaatatttatattaccaataagaactttcatttatcctcctgatatggggggaatccccccatattaaaaattacaatctggttgcaagtccggtttgttcattaaataaacattcaagctgatcacaataaatattatcaaattttgatatttcttttactgtagctccacggacacgggaaaatgtcaccaggtatgtatcagagaaggttaatttgattttaaccaaattaattcccttcattgcaaaatttgaaggtaaacgaaagcaaagaccagactcaccattttcatcaaaacaggcaaagttctttgcgcctgtcatagcaataaagcggtttccaccaagctgattaagaatttcagtagcaacaaatttggcgtggttttccatttttaagctcctgccgctgagcggctttggtgattggggaccatcccctctcgatgtgtttataataggtcagaactgacctattatcaagtattttttcctcctttctttaaaataaatatcgttaaatacaaatatttacattcatgcaatgcccggcagggcatagaaggggcgaaagaaaataccagggagcagcggggccacatcgccccgaagcgcggcgcagccgctgacgaacataccaggatgcacagggccatcccttcgccctgcaaagccaggacagaccaacaggccatgataatgctgatttgcgccgcagaatgccgcagttagcgcgagcgccagcgagtttacgccgtcctggtgcattgcagcagggcggggcgctgtactgcgcgtgtgagcgtcagcgagctacgggcgcaacattacattgctgcattcgcctggcattctccacgccttgaaggacggagttttactgcgcaccagataaaaaaaggggcgattaagcccctgtattcactattaacaatttaacatggttgcaggggataccccctgcaactattttcttagtagtatgatgtgaactcgtgtttttcttccggtgatcctttatatgctgtttcgaatgactcaatttcaattgctggcgtactgtaataatcacgcactcgccgttttaatggctcaccacagaaatcattgagtaatggggtcttatatccgctcattgaatgagtccgatgaactgaagcgcgaatctcctggacagttacggtttttttgccatgaacagaaataacctgatagaaattaacgttcgtttgctcatatccccaggaagatacaaacacatcgccaacagaaacagtgccgttattaaaagttaatgttttcatttttatctcctgccgctgagcggctttggtggttggggaccatcccctcccgatgtgtttataataggtcagaactgacctattatcaagtatttttccctccattcttcaaaaaaacaccatcaaatacatatagttacattcatgtgatgcccgacagggcatggaaggggcgaaagaaaataccagggagcagcggggccacatcgccccgaagcgcggcgcagccgctgacgaacataccaggatgcacagggccatcccttcaccctgcaaagcccaacggactgacaggccatgatcatgctgatttgcgccgcagaatgccgcagttagcgcgagcgccagcgagtttacgccgtcctggtgcattgcagcagggcggggcgctgtactgcgcgtgtgagcgtcagcgagctacgggcgcaacaacacaccaggcaaaatcgcatcctgaaaagttaccctgtaacatacacacaatgtaaagcgcaaaaaacaattacattgtaaagacacaaacatctttacaacgtaactataatgaatacaatgtaaagacaaataaacctttacactgtatatccgaggtttctatggggagagcattacttgtcgcatcagataaaggcggtgtaggaaaaagcaccacagcaacaaacctggcttcttatctggtaaataattcacgaacggtcatcattctgaagaccgataaaaacaatgatattcttagctggaacgaaaaaagaaagcagaatggcttattaccggttcctgtttatgaagagtatggcgatgtatcagaagtcattaagcgcctgaaaaaaatatgtgaagtgctgatcattgactgtccagggcatgacagcaaggaatttcgcagtgccttaactgtagctgacattctgcttactctcgttaagccgtcttcagatttcgaagcagaaacgctgactcatgtaacagaaaaagttcgcacagctcaacagatcaatccagacctgcaaccctgggtacttttcacgagaattaacacgacaaaaccacgccacagaaaagcagcgattgatctcgacaagttactccgggagaacccggtgtggatacagccacttcgtacacgtatttcagatttagatatttttgaagcggcctgtaatgaaggcgctggcgttcatgatgtacgtcgcgcatccagcctttctacagctaaagcacaaatagagcttttggcgcaagagttaggcatcaatccctaatggatgtaatacgacagctttacatcattagctttacacagtaaagctaatgtaatacacgaaaggtgatataatggctcttgacttgaaaactccggtaataccaggacaaaaaacagaacaaaccaatgcagacacagcccgattcatcaatgaagctacccgcaaaaaatcgggagcaactaaagtgaccaatgtccggcttggggacgtttacgaagatattctggaacgggaagcactgcgaacaggccagacaaaaacagcaataatgaaagcggctcttgcagcttacgaacacggcctggacgaaaacggaaaaaatcactggattctacagtcagccaggctgaaatgataaagcccttcggggctttatcccttacgttttaattgtttcttctcgctggctttcttacgggcatcgagaaccagttgcgcataagttgcgtgtgctttttttactgtaccagcaggtttcccgtaaaggtcgtaacgtgttgcgcctggtacagtacaattctgaagatattgccaccggaacgtcatcacctgaaccgcacaattccactcttcaatcgtcagatccacatccgggttatccgccaggtatttctcaacgtcctggagaatcccgcttttcaggggcaagttctttttttcgtctgtccatagttcaggaaaaacagcacgaactttattgaaacacttttcaaaatattctttcggatattttgggggaaaagtgatttgttttttcaaataccagggctgaggctgctttttatgtgttttctctgctacagcatctttcttctgtactttcttgttttcattaactgctgatttttgtacttcctgcggcttttcattcaccacaggattttctggcatgaccagaacgcggcgttttttgaccacaatcacgggtgttttttttggctgcatactcgcctcaataattgctgtcatattgactaattataccattttcagcagttaatatcctgaaaatacatggaaaagggggtatccgtacagaataccccctttgcaaaggcgcttaatgccagaaccacatcatccccaaaaaggcgggctttcgcccgcctccgggttgctacttaccgttggattcgtaagccagacttgccgtaacctccctgtttccatctttcagccggacctcgcacaaacgattccgggtcagatacgtgaatattaacaatgtgcagcacacgattaataaacaccaggtcagggcgtttttcggctgtttcatggccttcttctccttgcgtaacgcgcggtaagaggctatcctgatgttgttgaagcattgggatcgcctcgtgggtgtactgaccccaaaaagttggacagttaaacacgaggcatataggtctgattccgatattcaattggagtcagaccttttaatttcaggctaattcttctgctgttgtagtattcaatatattccgtaacagcatccttcagttcgcttatattactgaactcatcaagataaaaacactccgactttaaggttccaaagaaacactccaccacagcattatccagacaattgccttttctggacatgctttgtttaataccatgttctttaaggatattttgatatcttctcatacgatactgccatccctggtcagagtgcagaacaggatgctcgtgaggattaagctttttgaatgcctgatcgagcatattctcaaccatgttcatcactggtctttccgaaaggctgtaagaaataacttcgttgttgaagagatctattactggagacaaatacagcttgcgcccattgactgcaaattcagtaacatcggtaacccacttctcgtttggccgcgtagccttgaaatctctttggagaacattaggggcggtttgccctacctctcctctgtaagagcggtatcgcttgaccttaatcgctgctttaagtgagagggttcccatcaggcgctgaacagctttatggttaatctgtttcccttctcgatgaagagacagcgttaccctacggtatccgtatcggcctctattctcgtgataaatctcactaatacgctttttaacgtccgcatacttgtcaggcttgctgagagcctttagatgataataaaacgtactgcgcggtatctccgcagccctgagaagctcatcaagaggataaaactgccttagctcgttgagtactttcactttttcgtgggatgagctaaggctttcagcttttttagatacataagccgcgtttcaagaaatcgaacttgcctttcaagatcctcaatgcgtcggtcttttgacagctccaatgctgatgccgctttttctggatcaactgatattgcaatgtttcttttggtgccaatcttgagcgcgcgtaaaccagcttctccgcgctcttcatagaccttcagccacctggctacagaaccactaccagcaagcataaagtgagcagcagcctgattaagggacatgtgctgctcgatcacagctttcacgaccttaatacgcaactctggatcagcactaacgcctttaggtttgggaattaaacctttttctccatgtttttcatagagggcaacccatgtcctgacctgggttcgggggacaccaaaacgtgccgagatgatcctgtaaccatcatcagttgtgaagtagtgattcacgacttcaaggcgcttttcaaaagggtattttggctttgacatattaggggctattccatttcatcgtccaacaaaatgggtgcagtacatgggttaatgaaaaattaactacggggctttcttctttctgccgcacaacaagcatcagcagcagttccaggcttccggcaaggcgatcaacgacaaggtgcggatgtatgggcgcatcggtcaagcgttgattgaggccaagcaaagcggcagcgatccgttcgccgccatcgaggccgttatgccctgggacaccttcgccgccagcgtcaccgaagcgcaaacattggcgcggcctgccgactttgatttcctgcaccacatcggtgaaagctatgccacgctacgccgctacgcgccgcagttcctgggcgtgctcaaattgcgggctgcgcccgccgccaagggtgtgctcgatgccatcgacatgctgcgcggcatgaacagcgacagcgcgcgcaaggtgcccgccgatgcgccaaccgcattcattaaagactaactaccatggtccatatgaatatcctccgcccggatgatcctgacgacggagaccgccgtcgtcgacaagccggccgactaggtcgacgcttggattctcaccaataaaaaacgcccggcggcaaccgagcgttctgaacaaatccagatggagttctgaggtcattactggatctatcaacaggagtccaagcgagctcaaaaattaaaaatgaagttttggaggcctcatttggtgacgaaataactaagcacttgtctcctgtttactcccctgagcttgaggggtcaacatgaaggtcattgatagcaggataataatacagtaaaacgctaaaccaataatccaaatccagccatcccaaattggtagtgaatgattataaataacagtaaacagtaatgggccaataacaccggttgcattggtaaggctcaccaataatccctgtaaagcaccttgctcatgactctttgtttggatagacatcactccctgtaatgcaggtaaagcgatcccaccaccagccaataaaattaaaacagggaaatctaaccaaccttcagatataaacgctaaaaaggcaaatgcactactatctgcaataaattcgagcagtactgccgttttttcgccccatttagtggctattcttcctgccacaaaggcttggaatactgagtgtaaaagaccaagacccgctaatgaaaagccaaccatcatgctattccatccaaaacgattttcggtaaatagcacccacaccgttgcgggaatttggcctatcaattgcgctgaaaaataaataatcaacaaaatgggcatcgttttaaataaagtgatgtacaccgaatttgattgcgtctcaacccctacttcggtatctgtattatcacgtgtatttttggtttcacggaaccaaaacataaccacaaggaaagtgacaatatttagcaacgcagcgataaaaaagggactatgcggtgaaatctctcctgcaaaaccaccaataataggccccgctattaaaccaagcccaaaacttgcccctaaccaaccgaaccacttcacgcgttgagaagctgaggtggtatcggcaatgaccgatgccgcgacagccccagtagctcctgtgatccctgaaagcaaacggcctaaatacagcatccaaagcgcacttgaaaaagccagcaataagtaatccagcgatgcgcctattaatgacaacaacagcactgggcgccgaccaaatcggtcagacatttttccaagccaaggagcaaagataacctgcattaacgcataaagtgcaagcaatacgccaaagtggttagcgatatcttccgaagcaataaattcacgtaataacgttggcaagactggcatgataaggccaatccccatggcatcgagtaacgtaattaccaatgcgatctttgtcgaactattcatttcacttttctctatcactgatagggagtgggaaaataactctatcaatgatagggtgtcaaatcgatgcacaacgtgcgttacatatcaaagggaaaactgtccatacccatggataacgggcgtataacacgcccgttgttttatgatgatgtaaaatcttccccaaaactttccccaaaacccttccccaaaactggctatgaagttcctatactttctagagaataggaacttcggaataggaacttcttttgcggccgcaagatccgctcatctgtaacatcattggcaacgctacctttgccatgtttcagaaacaactctggcgcatcgggcttcccatacaatcgatagattgtcgcacctgattgcccgacattatcgcgagcccatttatacccatataaatcagcatccaggttggaatttaatcgctgcctcgagcaagacgtttcccgttgaatatggctcataacaccccttgtattactgtttatgtaagcagacagttttattgttcatgatgatatatttttatcttgtgcaatgtaacatcagagattttgagacacaacgtggttcccgccatatgaaaatccggccagaccaacatcattctggcgctccgaaagaagggatattcgccgccgtgaccagcctggagcgggtcgcataatctttggccgcttcgtagtcgaggaacatggcatgaaccacggcagcctggcggctgcaaattgaaaaccgccccggttcgtcctgttgttgccgcacgccccgcagaatatgtatgctctgaggacctgttttattaaggactcatccccttatgttgacccgcaaaagtatcgatacagttctgctctctgttggtgctgagaagctctcacaacgagaatgggactggatgaaaatgctcaaacccatggacccaccacctgcgatggtgacgacctccatcctgaagcgccgtggcgatacagcagcccttaccctgctacaggataccggggtttaatccatcctcatgttgtccggttttactccccgccctctgaaacgtctgttcacagccaaccagtgctggacgtccttcctggatgcgggcggtctgcgcgatatcgaggttgaagccgtcaccaaaatgctggcctgcggcacacggatactgggtgtaaaagagttcgggtgtgataacccggactgtcagcacgtaaagtacctgaccaactcatgcggcagccgtgcctgcccgtcctgcggaaagaaggccacagacctgtggacagcaacacagctgaatcgtcttcctgactgcgactgggtacatctggtcttcaccctgccggacacgctgtggccggtgttcgaaagcaaccgctggctgctgaatgacgtgtgccgtctggcggtggagaatctgctgtatgccgcccgaaaacgggggctggaacccggtatcttctgcgccatccacacgtatggccgtcgtctcaactggcatccgcatgtacatgtgtctgtaacctgtggaggtctgaataagcatggtcagtggaaaaagctgagcttcctgaaagacgcgatgcgttcacggtggatgtggaatatgcggcagctgcttctgaaagcgtggtcagaggggatggcaatgccggagtcgttgtcacatatcacgacggaatcacagtggagaagcctggtgctgaaatccggcggaaaatactggcatgtgtacatgtcgaagaagacagccggagggcggaatacggcacgctacctgggtcgttatctgaagaagccaccaatagcggcttcccgactggctcattacaacggaggggcaagcctgagcttccgttacctggaccacaaaacgggagaaacggcgacggaaacgctgacacagcgtgagctggtcgcgaggctgaaacagcacatcccggagaagttttttaagatggtgaggtacttcgggttccttgccaaccgtgtgtgtggagagaagctgccgcaggtgtaccgtgcactggggatggataaaccggaaccagtggcgaaagtgtgctatgcacaaatggtgaaacagttcctgagtcgtgacccgttcgaatgcgtgctgtgtggctgccggatggtataccgccgggccattgcggggctgaatgtatcagggctgaagaaaaacgcgcgggatatcagtctactgaggtatatgccggcctgacacaggctaagtgtgcccgggaatcggtgaaagtataaaaaacagcctgttacggtataaaaatcgaccatacagagagggaaaccaccggagtggtgggaaaagcagaaaggctcacgtggcataaggcgtggacaatggtatcgactggtttttcaatttcctatacgtcaagatacaaaccaccttttcgccatgaggcagaaagcctcaagcgccaacagcattatatattgaccaggaattaaattcccagctttcggcgtggactatacagtgtgtgattcaccacgatgaatcctttgttgatccactgtgtgacctgcgcaggttgaactccggtcagcctggcgaacgatgcctgattcccccgatagaacttgttgatgtattcaatcaaaggcattttttaattctccgaaacaacgcaaaatcatatagtaatttactatatgatttttattccgcaagtgattaactcatcggatttctttgtagttaacgaaacgttaaatttagtttgtgcctggaatggcacgcaagaagcacactagcattatcattttgatcaaaacgctatttccccccgttattggggggctttctttttgatgccgcgccagcggcatgtaaggcggcactctgttgttttatatggcacagagctaaaccgccgaagcccggcgtaagccggtactgattgataggtttcaccttacccatccccatcctgctaagccatacccgctttcagccatgaaatagcttttgtgcgcggtcggagtggtcccgacaagggtttacccgcagtcggggcgtatctccgcgttagcggaccgtcagggccgcttacgagcgtgtatttggtacttccagccagaaggctgacagcgatgagatttcttagttacaacatccattattgaaagcgatgttgttcccgccctttgggcgggggcggcggcgcttttcagtgatgggttgggcactgtggctgagtatttgcagcgtttttttgtaggagggttggaggggctttgtttttcattaggcagaagtccatatgcccgccgcgaagcggtgggaggtacttttatattctgagcggcgcggcgttagccgctgcaagcgaaggcatttttgtgattatccacagttgtttcaaagataaatattttccctgcggcgaagcaacgcaggggattaaagaacaggggttaagaatatattgcgggtttgatgttctatgtttgctgctttctgaagttattcctttgcgggtttttgtggataaccgaaggcgtttttactccgataccctattgcggccatcaaaaaactgtcagagcgggacaaaatgaaaaacggtcgtcaaatatgaggaatttcatgaaatgcaggcaacacgaaaagccccgaaggggctgaagagagtgccgattgtatcaggcagctaaactagtggggtggcgaagctgtcagagccagttcaagctgacgtagatctctggctaccagttgctctaatctttctttagtgcaccagtacgcttcgtccggcggcatacgcttcagaataaaccgcgcaatttcgtttcgctgttcatcatacggcagttttgccaggcgattagcacgtttgcgctccgctgctttcttacgtcgggacttgatggcatcgagagaacgctgcgcataccagcgtttacgagccgagtgaacagagatttcttcgccctcgcggataacgccttctttaatcaattgcagacggatttcactttctgcaaggcgcttacgttgctgctcctgaagtttcaccagatcaactcccagcattttccagccagtttcggtgatccagacgtatttcggcagtcgctggcgggattcacgatcccatatcgtcttttctgacgttcccaacgtgccaaaggaaacctgctctgccagcagacgggaaaggcgcgatactgtgactgcggtttcaggaatcacgtctcccttactgtcttttgggcttatttcttctgccaggcgggagacagacatgccgacagtgtgcaatccacgatcacaaaaactcacaagtacaacccatattgcgtcaagcagccgctgtttctccggtcggaatttatatttgcgaccgacactctgacgtttcagtacataaaatggatgcaacgacatgtgcattctgagtgtgttctgaccagtgaccgggtcttttttaacgagacgattgtaagcgtggcccaactgtccgcccagcgccttatagttgtcgggacggaaccaggctggattctcacactttggcttagtggaatgttcaccccggcgacgttttgttgttccgcctttgttttcctgggggaccaggaatgagctttcaattcccgcttcgtagtcctgccagaaacggatctgctcttccggtgatagttcagaccagtgacgtttgctaatcacagcaagctgcacttagcttgcactgtaagagttgatatttccttctcatggaattaaactccacttcaggtaacaagcatacctgaaataaataagctcaaggctctgccttgatgtcagcccccgctaatcttcgctgcctggaaaacacgagattacgggggttttctttatctgaaatttacgttcttgaacaaaatttcagcacctcgttttctgcatttacaaatcgcggaaaacttgcctgcaaatttagcagcatgggcgcaatcgatcaacgatgttcaagcctggctcgtttcctttttgattcagcacacatctctgacagcttcaaaatcgttttcagaacagctactgaagccccttctttactgacgttccccatacaaaaccttacaaaatcagaaattcagaattttgtatattcaaaaaagtttttttgactgcatacacccactcacacgatcgaataaaccacacaaacagtattatctagatttttagatcgtacatcatttaacaaacagaatattattctgctttttagatgttatctagatcattagatcgctcacgcggcattgacaggttttaaatgtcgcacacacaatactatccagatgattgtaaaaagctcgttcatcgcgttttttgtgctcattgcctggaaaatgagcactctttgacgcccgttagaacgcttgtcatctcatgctctttaacaaccccggacagcggtcattgcctaaagccctggcataaggaggttattattcgtgcatttcaagcaccgctggcatctgtcagcaacgggctacgtaacagagtgacgtgccgcgccatctacacaggtaacgactctttatccgcaaatatcattctgcatacttaaacccccttatttggtgaactcgcgttgagttaatctcactcactctctccctgagcaagtcgtacaggctgcaacgcagaagtacaccagatttgccagtctccactccaggtaagggggtttagctatgcatgatgatgaacaatcagataaagagcctgtagtgagtggctgcaacttttcataattagcttatgacgctgtattccggggatgtttctatttcagacaaacaaccgggagaaaatatggcgcgtaagttaaaaattaatcctgtcattcctgaatgtgtggcagatttgaaaggatatccactctatatcatcgttgcttattggggattaagaaataataaaacgctcacaacaacggatgttagccgtaatttccttattacacagcaacaatcttatgatgtgcttacctacatttaccaggaagcacagaagcagataacagcaactaaacgaacactatttaacgagcacaaaagaagaattagtgcgttcaggattcttgatattgacaaaggcatattgcgcaccccaaaaaaagagattgcatatgccagctacgacaatataccaactgtaacaatgaaaagtacccgttgtgagatccaagatagttttacagaactgcgccgctggatgtgttcaagaaagacaggtgatcgagtggaggtatttttgaatgtctaagtaccaaataaacgcaaccatcaaaaaaccaggtggtggccccgtgaaatggactcattacagcgacttccctatgaccgctgaagaatgcagaaaaaacttctcaaaagaaaaagaagcaggaaagtgtttttctgttgatgttcatatttcagatttcatttgcaaagaaatacatccactgtgatgaatggggagaggattaatcatgattgacgctataattacgccaatagttacatctattccgttactcttattaattttagttgcgctgatattcgttaaatctgccgtcaaaatcgtgccacaaggtaatgcctggacagtggaacgctttggtaaatatacccatacgctttcccccggtcttcacttcctgatcccggttatggaccgcataggtcaacggatcaacatgatggaaaccgtcctggatattcctaaacaggaagttatttcgaaagacaatgcaaacgtaactatcgatgctgtttgttttgtccaggtcattgatgcagcgaaggcagcttatgaagtcgataatcttgcatcagctatttcaaatcttgttatgaccaatatccgaactgtcgttggtggaatgaatctcgacgatatgctttctcaacgtgacagcatcaattctaaactgttaacggttgtcgattatgcgactgacccgtggggaattaaggtcacacgtattgaaattcgggatgttaaaccaccaaaagaactgactgaagcgatgaacgcgcaaatgaaagcggaacgaactaagcgtgcccggattcttgaagcggaaggtatccgccagtcagaaattctgaaggcagaaggggaaaaacagtctcaaatactgaaagcggaaggggaacggcaatcagcatttcttcagtccgaagcacgcgaacgtcaggcagaagcggaagctcgcgcaacaaaactggtgtcggatgcaatcgctgaaggtgatgttcagtctgttaattactttattgcgcagaaatacactgaagcactccaggcaattggcacagcatcaaacagtaaactggtgatgatgccgcttgattcaagtagcctggtgagttcggttgcaggtatcagtgaactgctaaaaaacgtatcacaggatactcccaaagttgatatgaaacaggctcaacaatatttgtcttaaaacagatagcggacggtgacaatattgttttaatcaccgtccttatattcatattcacgaatgagcaaatcattaaaatgaaaacttatgggttcatccttcttattttacatataatccctatgggggcatggttctttcttctttttattacaaacgatgagaacaaagtagaaaaaatacaaaaccacatcgtatcaatatttccattatggctgaactggggaggggtgatgatagcgatggctctactgcccctgttaatatggagttttaatggcatattcttcggcttctttctgctaatttatgcatttggcgtttataactaccttcatcttctttattcaatttctcccttttatcatggagattagccatgttatggtatacactatttcttctgtgtattgcacttgaacttataaccggaacaggatggttactcttaatcagtcttggtgcattatcaagcgccattgtgggcttttttcttccgatatcacaagaagccaatatatgcttctttgcgtcaatcagcatactggcgtcgataattaagttcttctatgacaaaaaacataagaaattagacactctcctggtgaacccagggcattcacgttttaaaggaaaagaatttacgctcagtgacgatattgttaacggcaaggggcaattactcattggtgatacattctggcctgttgagacgttacacaatgaaaactaccttgcgggaacaagagttattgttacagacatgcaaggaataactcttaaagtaatgaccatcgaagacaagagtgaaaacaaggaataaatcatgcatctttcgttgttaattccgcttacaggagcagcgatgaatgcactatgtatttttattatcagacttctggataaggattttattgaagtctacaaaaaaacgctaaaaaaaattactgcattacatattttattgatggtgttaagtgtcacaggaatagtatgaggacaattctatgcgaaacgcaaatgaaggaatttctcttgcagctattgtagctaaagaaacaacaacaggtaaatggaatggtactggtgggggtattggtttaggtactggtggtattggcttattcatcggaggtgtttctggttctaaacaagagcagacacaaagggcaaaaaactttgaatcgcctaaagaggaagaatacagtctattaaatgtatacggttcgataataaaagttctcgttttcggcgtgctatttggtttatctgcccgtttatttacatctttatcaaacactggttctgattttgctgaaccagtaacaaccaccacagccacaggaaagattcaatctattatgggtggcatggcagaaatggtaagcattttaggcaccgttgtcccttttttagtaattatcacagcaatgatctggtttctgtttttcagcagcaaacgagaaaaagaagagttaactcgagttgaacgtgaagctgctaaaacaaaactccgtatagatgtctatcaccgtttacgttacgttgaaagcgatcatgtcgtttttgacccgattacaggccgggaggttccggcagaacggacgtgtattaataaactgattgaggcacttgttgatgaaagcaacgacatctcaaaaagaaattgacgaacttctgaatgcaataaaaacaggacattcaaaattcattctatcaatacccgtacatactacccatccaatggcccataaaataatgaagccttacttcaggagaacaggaccgcttctgtattcagatagtatattcaggatttgaagaaagcatttatttatatagggcatacaaaaatgagtgcttttattaagctggcatctgttctggcgttatttattagcccggttgtggttgcaatagcaggagaacaatctcactgtacaaaaatcaacgaataccctttcatcgtcactcaatgcgacgacggaactgtgacagtggtaaatgtgataaataaccgtgtagctgtgtgccgtaaaggggaatcatgcaaagaaataaa

SEQ ID NO: 168 - DNA, 74121 bp, Artificial Sequence
  plasmid TP114tetB-Kill1
attataactctggacacattacatgactcaagcaaaagctaatctgagaaaacttcgccgtgcacgttatgtcccccctcgaacagtaaagaaaagcatagcgaatacagaacgtgtcgtttcaaaagcaattaccggctgtggtgtcttccgtgatataccacaagtaaaaatcaatctcatcgaaacaaggaaaattttacaaatcgaactggctttatccattgctaacttatctgaggcgaatccaattgagatacgaaaaaaaatcaaaagcattgaccgacaattatcttcaacctcaaaaatcagaactacattatgaaaaaaaacgacgatttaatcactttaccacctcataacagccacgctctcgattacatcattaaaaaagcgtttacaccacgtaaaaccaaaacatcgacagcgacccacaacgtttatagttacaataaagaagaatccacattaaatttccaaaaaattggagaagcaatttttttcggcacagacctggtaattaagctgaagccaaatattagtgcctctggtgaactcttcatctgccagaaggactaagctatgaacattgtttcagaatttcttgagaaagtaacaaccattgttgaatccacagcggcgacgaacgccgctaaggtcgcacaggcaatatctcctacattttttgcggctatagccttatacgttatttatctaatatatgaaatcacgtatgcccaacgtgacatccttatgaacgaggtgacgaagaatatcggtgcattcgccctggttggtgcattcacttattcagcgccttattacagccagtttgttattccttttgtaatgcacgctggctccgacctttctgctgctgttactggaggttcaggaactgcaaccagtgttgataatttgtggaacgctctatctacgaatttaaacaacttccttgatacaagtatgagtatttatggaaagttccaaattgctgagaaaatgggggtttatctagtatgggggattggctatatcggcggaatgcttctcatctattacactactgttttcttgacactatcaactttcatggttggaattcttctttccgctggcattttattcatttgtttcgctctattttcatcgaccagaaatatgtttactgcatgggtcggcagttgtctcaactatatactgttaaatttattctatagcatatcatttagtttcttaattagtttcgttgaatcagttgtccctgttaatggagatataaaactatctattgtagtttactttttccttattactattatttccatattccttatagaacaagttggcacactctgttctacattaacaggtggggtaggtataaatggccttacatcagccgctaatggctttggaggtaaggttgcatctggttttatgcgagcatcaggactccgatctttcaccaatggatttgccagcaaaatgccaaatccattctttaatgcaggaagtcgttctgcatcagcattagttcagggattaaaccgtggaagtaaacttaaagcggggtgattaacatgaaagataaagtattatcatttctctttgctggaataattaccgtaacatcaccatcaatctttgcatctggtattccagtagtagacgttacagcgatagctaaaacagttgaagaagggctaaatcgtgccgctgaagcggcaagacagcttgagcaactcaagcaacaatatgaacagaccataagatacgctgaagaacagaagaaaagactcgaaggcttcactgatttcagcaatggctttgatagcgcatccagctatatgaaggattctctatcaacaataacaaatagtgcaaaatcagatcttagctctttgcgatcgcaatatgacttatcaagcaacattgcagagacgcaacaaaaatatgatgcaatcctggctaagatcaaattctatgaaaatttcaacaatgaaatgcaggaaagggctaagagattaaccacgttacagaaggagttcgcgtcagcagatactccgcaaaaaaaagctgacttatctaaccaattgaatacagaaaaattgacaatggagctacaattgaagcaatatgatattgcagagagacagctaatcgcgtctgaaaatgcaagacaagaggctgttagtcgagaaaagtttaaattaatgatgcaataggtgttcgaatgaaaaaattcataagcactttaactatcttgtcatgcttccttttagctgcttgtgaagacaaagtttatgatgtcagttactacactgaacatcttgaacaagcccaagatgttgtcgaaaaatgcagcaaaggggatatgtctggtcaaaactgcgaaaatgcgcgtgaagccattcaaaaagagcaatcgggtaaagcatttaaaaatatgatgcaataatccttcattaaaaacagctcgcaaagcgggctttttttggctgtacgcagtgaccagttgataaatagttctaatgttcgtgctgcattagaacaacgcacaaaaagaagagtacaagaagacagtgcgggatctaatggaacgtttacaatagaatcaccttccctatagcaaggtgattctatttaaaagaatacccgcctcgtgcgggtcttatcttgcttaaagatctatgaaacctccggcttcgggtattaaactataacttgctttggcaaatattgtttcattgacttcatggaatcttattttctccgcctgttcatatgttacagggaagaacacgccccctggctcattaaacatcataaaatcaccttgcattgcgttacaatgacaacaatgattcgcgtaatacttcatttttgctgttttgctatgggatggataatataattttgaatactcattaatccttgagagagcagaggttgaaattatttcaattttcgttaaatcagtccaccatactctactggttaaccaccgataaatcatatttttctttgaatcaaaatactccatacccttaggggaggatgtttcataccattcatctaatatacaatcttcccattcggcaggatcaactccccaaataacgtctctatacttataccaacgaggcaaaaaaacaccaaacacaggagttattttcttacagcgccaacatgactggtaactttccgcaatataaaaacgttgagaaaaaatattgtaatcatgttcgtttaattcttttacccactgaataaaataaattggatttttcccctgtggaacaaaccatttccgttgttcttgatcccattgcgcccctttttgtttggctaactccttttcttcaaaaggtacatttaaataaaaccgcgccataaccaacttaactccagtattctgttctgatgatgcaacaggatagatatcaaaactaaacaaagagtgcaattccgcctttaatggctcattcgtacccgcctcgtgcgggttttcttttgcctgaaatatggaggaactccatgaaatccatcattttatcgatggttgccgccaccgcattactgtcaggctgcgcggatagcaaaacacaaccagtacctgagtcaccgttaaccaaacatgaccatcagatcacgttgaaaattgataccgtgcgaacagacctgccggacagttctcctgtttgtttgaatggtatgaatatatacgaaagtctgagcgagcggcatccaggcttgtttgccaaaaatcagaacgtgattttccgtagtgcattctttgatgacggtcaggcgatatcctccgaaacaatccgcaaaataatgcagagtaccccgtgcgttgaatcacaaacaacatctgccggaagctgggaacctgccacggaactgctcccccgtcaggcaatatccggtgacactacactggctgaaaaagatcggactgctggcttcacaatgcggatagcaccggagattgagcgtggaaatttccacctgctactcacaaccactgacccgatacggaaacagactgtcgagcagaatattttactcaaaccggaccagccccttatcgtgagtggttttactggagttaatgctgatagccaaagtgagaaccggattgtcatcattacgccacacgtgcgttgattcccctgatatttaaattacccgcctcgtgcgggttttcttttgtctgaaatatggaggaacaccatgaaatccatcattttatcgatggttgccgcaagtgctatcgcactctctgcccccgtatatgcgtctgatccgtgtgcttccgttctttgtctgtacggtaaagctatcggtagcggcggcgggagcgaatgcaaaagcgccgaaaaggacttctttaatatcataaaaaagaaaaagggatctattcgctggagcaaaacctttgatgcccgaaaagcgtttcttaatcaatgcacgaccgcagaccctgcggcgatctcaaaaatcatgagtaagttcggacgttcctggggttaaccatgaaaaagctcattattattcccaccacattattgctgaatgcgtgttcccatgcccctgaacccgcacaggcaaaaggaggttggtatgaactgaataccacaattgagcaggtaagagcagacacatactataacggggtgatccttcagcagcccgtgtcacagccaaacagcactgttcaatacagcaatgataattatctcaaaaaggaaaccataaacgtaactcccgcgcctcgtattgcagaaaccgtaaaaccacgttctgagcaatcagcgacagcgccaaaaaaccagggcagcaataatagttttctgaagccgacaacaaacagcataacttcatctggtgagataaaaacagcagccaaaggagcaactaaacagcattctgaacaaccagcactctctcccgcaaagccaatcagtagcaacaaccatcaggcacaaacggcacaaaagactgatcagcagacaaaaccgcgtcctgaacaaccaccgctaatgtcaaaaagcggttttctgaaaaaaaacgctaacaacgctgttccggccaccacgcttacaggcccatcaacacctgaaaagcaaatttactttgttcgccatgatggtaaaggctcgctgcaaaaagcattaaaagaaattgtcccatcggactggacggctgaaatatccccggaggtaacgaaaactttccgtcgcacgatatcctggcagggcaacgatcaatggccttatgtcctggataaaatgcttcgcaactacggtctgacggtaattaagaacaccgaaaaaagacatcttctgattgattttcaacaacagaaagggaaaacatcacaaaaagcacctgtatctcctgacaaaacccctgcatctcctgtcaggacaccagtttcctctgacaagttacctcaaaaaccgctaacgcctgtcaccgttccgcaaaaacagacagaaaaactcacctggaatcttaaaaaaggttcgacgctgcgggatggcctcaccgaatgggcgtcaagttcaccgtgtggtaattcaacctggaatcttgtatgggatactcctgtgaactacagaatagatgctcctcttattttccggggaaactttgaatctgcattaaaagatacgctgatgctttatctttcagcagataaaccgttatacgcattcaggaatattgcacaatgcgtaatcacaattaaagacacacaacaggagtaatcgctatgggttggttcttcagcttgctcctgatattcctgtcaataggcagttactatctgacagataacaataaccaaaccatacagcgaatgaagttgcttcctgcaaaacaggaagcaattgaatttgtccatttcgcaaatgttatcaatgactatctttataaatatccagacaaacgtaattcaggaggaacgttaacatctgagcaaatcggtataacacccgtttatgatattcatcatattatttacggtaagcgagtttatatctggtctgccgatacagaaggtctgatgtctgctttgcagcagcaaacaaaacattcagcaatgttaggaagagtaaaaaataagaagattgtcgataatcaggggaatgatatgggcgttcccgttccttcctccattccagaagaggctattgtactcattaactaaatatcccctgacaaggggattctgaactggagtctgcatatccgacacatcattatgtgggccggatatatcgctacggcgcggacttcagtccagaaaatctttaccggagatacccatgcaggataatgatgatgtcagcgagcttgatattgccactcgtgaagtccttatcttacgatgcaatcttattcagcttgcttctgaatatataaaaataaatcctcttaaaaacacccgaatctacacagatttaattcatcgttcagcagatgttatcaaaaatatcgaacaaggtaacatccagaataaacataattatctgtcacaggatgtaaaacatacgcttgttttatacgacctgtacaaatcagactttgaacaatgtccgggggcaaaatcccttatacctgtcagggaaaaaattgtctcgctgaaagaacttctttccggcgctaatgagctggacagtatcgttcgtcgcccccgcaggaaaaaacgttcttcacgaatttaatatcaggagataaatcccttatgcagttatcagcggctgttctggcagcactgataagtcagtgtgcccctgatgtatcacccgatacgatgaatgccctgattatgactgaatcaggggctaatccatatgtaatagcgaatgtttctgacggaacaagtaagtattttaaagatgaaaaaggagctattgaatatgcagaaaaattaacagcagaaaataaaaggtttagtgcaggtctgacacagatatacagcaaaaatttcccatcactcaatctgactaataaaacagtttttgacccgtgtacaaatataaaagcaggagcggcagtcctgacggacaattatctgagacaaaaggagggtagtagtaatcaaaaaattctccgcgctttatctttgtattattcgggtaacgaatcaacaggatttattaaagaaaagaaatttaacaacacttcttatctggaacgggttattcgtaacgcgaataactatatcgtgccatcaatccgtgaaaaaactgatgaatcagaaataaaacccccgaatgatgaagagaaaacatcaccggactgggatgtttttggagattttagttaatgaaagtcaaatcaactttgcagtattttatcctggcgtttttcctgtcactaactgcctccgttgcctatgcaggtggactcgataccgcaacaaataccatgacagaacttaagacatgggcatttagctttggtggtgtttgtgctttgtgttacctgatctataacgtcatcatggcattcatggagaagaaaagctggtctgatgtaggaatggcgcttgtctattgttccctcgctggcggtgcactttacgccgggaactgggcgctggaactcttcaaataagtaatccatatatacaactgtgccgcatatttaccttatgtgtgaattgcggcttttttcatggtgagttatggacaaagtaaatgaacatgtcagtgagtcattcatgacttataacgggtttaaccgtcctgcgttaattgctggtatacccttaatgttgttattgttcacggcttttttcgctgttctgacaggcttccccgctattttcctttggggtataaaagggataattattcctgtcatatgtgcgctgtttctttttatagtaaaactggcctgtgaaaatgactcaaacgcactaagagtcatccgtttaaaccttatggggcttttgttaaaaatccgccacagagatttaattattggttattcatctgtcaggtaacatatatgcacaaaatcaaattaaaaaacagtgacaatatggatgttgctcgtgaatatcccgattatcgcttccatataacagacagtattatctttacttctgacaggaaaatgctggcttcacttgttgtagcaggcattccatttgagacagagaacgataatgttcttacaaatttatttaacagcgttaaaaacttcctgattgggttaggaaaggaaggcgacctgtatttatggactcatcttatcaagaaaagagcaaccatcaatggagaatggaattttgacaatgattttttaagcaggttttcaaaaaaataccttgctctgttcacatccagcgcattctataaatcaacatggtatctgacatttgggattccctacgatgatgttgataccggaatcgagcgcatgaatgaaatgacacaacaggcgcaaaaagcacttctaccatttaacgcttctttattatccgtttacaatacttatattagtgaggtggcagactatctatcactattgctaaatgcagaacataacatgattcctttatcatccacccccttatcatccagtatttgtgattctgaatggtattttggtgctgatgttcttgaactgcgtaacaacgaatcggatagtaaaaaattcgcaacgaattatattttgaaggatttcccgatagaaacaacccccggacaatgggatttccttctcaaacaaccctatgaatttattcttactcaatcctttatttttgagtcaccaacaaaaaccctgaagaatatcgattcacagttaaacaaactacaatcagctaatgatgcagccaaaatacagcaggaagaactcgaagctggtaaagaagcggtcgcagccggaattacgttgtttggttcactacactgcgcattaacggtattcggtgatacaccagatcaggccagaagcaatggtataaagctctctgctgagtttattacttcgggtaagggattccgcttcagtcgcgcctcactcgcatcaccttttgtttttttcagtcatatgccgctgaataagaggcgtccactggatacccgaagaacaattaccaacctggcctgtctgatgtcttttcacaattattcctccgggaaaaaatcaggcaatcctattggtgatggctccgccataatgcctttaaaaacggattcaggcagcgtttactggttcaatacacattacagcccaccggaaaaaaatgttaccggacaaaaaattgccggacacgcaatgtttcttggcgcaacaggcacagggaaaacaacatttgaagcaacagccagcggctttcttcaacgctttgaccctttaatgtttgttgtggattacaaccgttctaccgaactttttgtccgcgcatacggagggagctatttcacattgcaggaaggtatctataccggctgcaatccgtggcaactggcagaaggcccggaatcgcccgtctggcacagacttctcgcatttctgaaacgctggacacaggttctggcacgagacaaccagggcaacccctgttctgatgaacatggcattgaattaaacgctgccgtggaaagcattatgcgaatgcctgtcgaagaacgccggacagcccttcttctcgatatagtcagtcctgaacttcagacgcgtctcgccaaatggtgcgacaacggcgaatatgcctgggcggtggattccccccggaataccttcaatccactgcatcataaaaaagtgggatttgatacaaccgttgtcctggacacaaaaaacggtattcatcctgcctgtgaacctttactcgcggtcctgtttttctacaaagaaatcatgcaacgcggcggcaatctgatgctctccattattgaagagttctggatgccagcaaactttcccatgacacaaagcatgattaaaagcgcactgaaagcggggcgcatgaaaggtgaaatgatgtggttaacatcacagtccccggaagacgccataaactgcgcaatttttgcggcgctggtacaacaaaccgcaacgaaaattctcctgcccaatcccgatgcaaaatgggaaggatataaagaaattgggcttactgaaaaagagtttgaaaaactcaaagagctgacgaaggagtcaaggaccatgctcatcaagcaatctggctcttctgttttcgccaaaatggatttgtttggattcgatgagtttatccccgtgctttctggctctgaaactggcctgtctatttttgatgagattattgctgaaaaaggagatgtagctcctgatatctggataccagaactcctgaaacgcctgaacggttaatttctctgttttatacagaacggaaaacaatatgaaaatccccctcataattgcctccgcgctattaattagtgcatgttctcacacccccaatcctgtgcagaaaaaagggggatggtttgagttaaacacagcaattgaacagatcaaagcaggtgattattaatggaaaacacaaactattatgaacattcaaaaaaagaagccaccaaaaagaaatttgaagaaaaaaacgaaaaaaaggattatttcaaggccatacgtgactttgagcgcagtgaaattgaaatcataaagaaaaaggcaaaaacatttaccattctcgccattggtgaatttgttgtaatttgcattcttggtttcgcaatagcctcccttgctccattaaaaaccgctgtaccgttccttgtgcgagtggataacagcactggatatactgatattgcccctcaattatctgatgctaaggaaagttatcaggatgttgagactaaatatttcctgtcaaaatatctcattaactatgaagcatacgactggcagaccatccaggaacaggccgatacagtaaaaacaatgtcttcccaaaaggtgttttcagcttatgacaccatgattcgtgctgattcctcaccactgaacattctgaaaaacaactacaaaattaaggtccagattaattcagtaatccttctaaggaaggatatggcgcaggtgcgtttcaaaaaaatggtactggatttatctggtaaacccgcccccggatacagagcaacagagtggatttcgacgatttcttttgactgggataaagatatcaaaacagaaaaagagcgccttgtgaatccgctgggactgcaagttctgagctaccaacctgatccagaggttataaaatgatgcttaaacgcactactgcgatagttcttttgtcgatgctacaagtacctggtgctttagcagctatgtacggcacaccatcggaacgagacgggcgtattcagaccgtagattataacgagcaggatgtatttaatgtgcgcgtaaaagcaggcgcacaaacaacaattaagttcggacaagacgaaacaataaaagatgtcggaattggtgatccagaagcctggtcagtatcggtcagggacaacactctgtttctgcgtccaaaagcagaagaaccggatacaaacgttaccgttcagaccaataagcatatatatcctctttacctgatatcaaccacgaaacaacccacgtatattctgcgttttaattatccgaaaccaccgtcagctaccgtaatgactgaaaagccatttccatgcactgatggtggaataattaatggtcattatcaactcaagggggacaaatcaattttcccttatcaggtatgggataatggcgaatttacatgcatgagatggactaataaacaggaaattccggtcctttatcgtgttgatgccgatggaaatgaacatctggttaacggagacagaaataaaaacacaatggtttactatgacgtggctgaaaatctccgtttgcgcctgggtgatcaggttgcagatatcagaacatcatcaatcgttaatcgtccgtggaataaaaaaggtacgtcaaacggaaaaacacgagtagagaagttcagctatgaaaaataaagatgatgaaaaaaataatgacgcgggaaatcgcggaattatcgaagtaaaaggtaaagcagcaccaaaaaaaatattaatcctcatcatattactgattgccgcgttatttgtgatcattatcttgtttaaagttctgtcacgagaacaggtcgttcagcaaacacctcttgagaagtctgacgagacactggtcacaaataccaacaatggcgtttcactgacaacaatgatgaaaaacatcgaagaaaaggaaaaactcgatgccgctaaccgcaggaaagcacaggaggagcaagaacagaaacaggcagacaatgccccgtcagcgccagcatcacaaaaggccgatcaaacagccgtcaatgtgatagccaacggcactccccaaaccgccagtggagatccaaaccaaccacaaccattgccaaaatccgtccgacaactgatgggcgacacaatggtgaagatcgacaatcaggaaccaggcgaaaaaaaccaggaaagagatgatttacagggcagtcagtacgcagacggaaaggtatcccctgtgctgaaccgccgatatctgttatctgcgggaacagcattatcctgtgtgctcaaaacgaaaatcgtaacctcttatcccggtatcacaatgtgtcagttaacacgagacgtctggtcggataacggcgaagtgcttcttgcccgtaaaggagcattactgatcggggagcagaataaagtcatgacacagggagtagcccgtgtgttcgttaactggacaacgctcaaagatgaaaatgtcaatgtgcgcattggcgcacttggcactgacagtctgggtgcttccggccttcctgcatgggtcgataatcattttggtcagcgttttggtggtgcattgctgctgtcattacttggtgatggtttagatattctgaaaaacagcacgcaacaaacaggctcaaacagcaatatcacctacgaaaacacatctgacgcaacaaaagaaatggcaaaaacaacgctggacaatacgataaatattccccccacggcatatattaatcaggggactgtattgtctgttattgttccgcgaaatatcgacttttcatccgtatatgaacttcagtaattcagtaaagcaattgatatgaataacatcagagataccagtaatacatcacaaccacgagataacagtaaaaccgcaagacgatatctggatatgacgggtatccagtctgttcttaatattgaacatgtcacagaaatatctgtgaataaaccaggaacaatatggtttgaaggaaaaaatggctgggaatctaaagatgcgccagacgcgacttttgataatttaatgacacttgccaaaactctgacgaacttatcaaagataaaaataccacttagccatgataatcccattgcatcggtagttcttcccggtggggaacgtggacaaatcatcattccacctgcaacagaaaataacagcgttgtgatatctatccgtaagccatcattaacgcgctttactatagatgattatgtccgaacagggcgttttgataatgtcaggattgcgacgaaacacgaagccatcctgactgaacggcaacgctacctgtatgaattatcccggcgtccagatggtcaatctaaagctcaatttttaagagaggcagttaaagaccgtcttaattttttaatcgtcggtgggactggctccggtaagacaactatagcaaaggcaattgcagatatctttccacctgaacggcgttatataaccgttgaagatgtaccggaaatgtctctgccgctgcatccaaaccatatccggcttttctacaaaaaaaataccgttgaagcgaaggaaatcattgaagcgtgtatgcgattaaagccagatcacatctttcttgctgaacttaggggtaacgaagcatggagttatctggaggcgcttaatacagggcatgaaggctcaatcagtaccattcatgctaataatacttatgcctcattttcacgactggcaagtattgtaaaacaatctgatgttggtatgactgttgatatggacctcatcatgcgcacgataaaaacatcaattgatgtcattctttttttcaaccataccagaatgactgaactgtattacgaacccgaagaaaaaaatcgctttttgagcacaatgtaaattctggagataactatggatgcaaaaaagacggggggattaattctcttcctgttactgcttcttgtgggtgtgcttatagcctcaaactatctcggtggatacacagcattaagatattcatccgttgatatgtctttgctcaagtgggatacattccattctgtaatctcaacattttctggcaacccacaatataaaaaactcgtttttatggcatggtttggattcagcgttccattaatattctttgccatattcatgttaattgtcgtgattgggattatgcctaaaaaagtcatctacggtgacgcccggctcgcaactgatatggacctaagtaaatcaggttttttcccggataaaaaatcaccttacaaacatccaccaatactcatcggtaaaatgttcaaggggagatacaaaaaacaatttatttatttcgccggacaacaatttttaattctttatgccccgacacgttctggtaaaggggtggggattgttatccccaactgcgtaaactatccaggaagtatggtcatactggatatcaaacttgaaaactggtttttatcagccggattcaggcaaaaagaattagggcaagaatgctttctctttgcgccagccggatacgcggaaactatcgaccaggccattaaaggacagatacgctctcaccgctggaatcctcttgattgcgtcagtcgcagtgatttacttcgtgaaacggacctggcaaaaattgctgcaatccttatcccggcaagtgatgatcctatatggtctgattctgcacgaaacctttttgtcgggttaggactttacctgctggacaaggagcgttttcacctggaacagaaagccaaaggtcataatgtaccggacgttcttgtttccatcagcgccatactgaaaacgtcggttcccgatggcggcaaggatctcgccgcatggatgggacaggaaattgaaaaccgtagctggattagcgataaaacaaaatcattcttctttaagttcatgtcagcaccagatcgcacaaggggaagtatagaaacaaacttttcatcaccgctgagcatcttcagcaaccctattactgctgaggcgacgaatttcagtgattttgatatccgggatattcgtaaaaagcccatgtcaatttatcttggtctgacaccggatgctttaatcactcatgagaaaattgtaaaccttttcttctcattactggttaatgaaaactgtcgtgaactgccggaacacaacccggacctgaaataccagtgtcttattctcctggatgaatttacatcaatgggtaaatcggaggtcattgaacgcgctgttggttttacagcaggttataaccttcgctttatgttcattcttcagaatgaaggacaagggcaaaaaagcgatatgtacggtcaggaaggatggaccacattcactgaaaacagtgctgttgtgctttactatccgccgaaatcaaaaaatgctctggctaaaaagatttcagaagagattggggtgcgtgatatgaaaatatccaaacgctcaatatccagtggtggtggtaagggaggaagttcacgtacacggaatgatgatgtaatagagcgcccggttcttcttcctgaagaaattgtgtctctccgggataagaagaataaagccagaaatattgcaatccgtgaaattataaccagtgaatttagccgaccatttattgccaacaaaataatctggtttgaagaaccagagtttaaacgccgcgtggatatcgcccgtaacaatcatgttgacattccaaacctgtttacacaagaagtcatggatgaaatagcaaaaattgcagaaatttatctccctaaagctggaggaaaaaaagtcatggttgccggaggcaatgtgattactaatccagaccttgataatcacgataaaacagacgtatctgaataatcctcgcaaccagcaaatagtattttgcatattccataaggtaattaaacatgaataaaaaattgctttgtttattaatatcctcttttttattatcaggctgtgcaaacttcaaaaaaatcaatgctaatgaacttgctgccgaaagagacgcacaaaaagcgactgaatacgcgaaaaaaattcgtaataacccggttatccaggattcaacaaaacaatggattaatacaacgccaattattgaaaagcaggtaaagcaatcagcgccgccctgcccgattgtgattaatactcgttcagatattgagctacgccagatcgcacaacgcatcacacaaacctgtcatatcccggtacgaatcagcgccgatgtctggacctatctgaacggtacaggcactggctcaacacaacaaatgacaggctcaattccagcacctgatgcaaatggaatggttcctctggcgtcagtaggcagtcagccagtaaaagtctcttctggcggtacatcactccctgaactgaatatctccgggcttcctgccctactgcaaaccgtatcttcacggctgggaatatcctggaaatacgataaaggtcgtatcacattcttctatctggaaacgcgctcattcccgattacatatatggacagcaatgtggcatacaactcaaaagttgtgagcggcacaatgtcttccagtggcagtaccggctctacaagttctggcggtatgactggcgacgcatcaaatacgcaaactacaaccgtggaaatgaaatcatcgctgtacaacgacctgaaaagcgaagtttcctcaatgctgacaccaggtacagggcgcatgtatctgtccacaggttcactgacagtaacagataccccggatgtactggacagcgttcaggagattgtgaacaagcgcaataatgaaatgagtcgtcaggttgtgctgaacgttgaaatcctgagtatcaagaaatcaagccaggaacaggcgggaatcgactggaacgcagtatttaatgatggtcatcttggtctgagtcttggtggctcatttggtgatgccgccgagaatgttattaccagtggtgtatccatcgtggacggtaagctggctggctcaaaagcatttctgaaagccctgtcgtcacaaggcagcgtcagtgtcgtaacgcaaaactccgctgtgactaaaaacctgacgcctgtccctatgcaaattgccaatcagcagggcttcattgaaagtgtcacaaccgattctaccgccaatgtgggatcatccacgtcactgaatgcggcaacaataacaaccggattcaatatgactctgcttccatacattcagccggattcacaaaacctgcaattgctgttctcaatgagtctgtctgacaaacctacttttgaggtgttcgaaagtggcggcagtaaagcacaaacaccgaatgtggatttgaaaacaattaatcagactattgatctgaaatcaggccagacagtcattctgagtggattccagcaatcaaaccggaaaaccagtaagcaaggtgtaataaccccctccttctttggacttgggggtggcgttaacagcgaagacggcgacacgattctggtcgttttgattacaccaaatgtgcttaattccggctccagtgcagtaataaaaaatgtgaactaattaactgaaaactccctgaaaaaacacagggagtttttttggaggtcactttgtctgagaataatcagaataaccagaatttcacttcggttattaaaaacaagcgtgcttttttctccggtctggactggaaaacgcttccttcagaagaaaagaatgcgcgtacattcgcaagaaaaaacgacgctgaatattttctctcctgtcagtatcaggattcagaaaatgaaaccaaaacgatggtggcatttatcagaaaagaggatcttcccacaggggcgtcctcattctggtcactggcactgatgataaaacccctcatcgaacctgacggatacgctatctgcgaactcggtgatctttatggctttgtttcctgcgtcaataacgttctcgtcaacgatgttgtaggtaacaaaagtcagatcatgagtgctctgacaacatttcttgagtttaatgaaacaccagaacccggctggaaactataccagcctgaatcatgggatatcagccaggcactcccctcactcactctgtctgcgttgattgacgtaaaaaaaccgccgaaagaggcggcgtttactcgcgtatcccgaaaacgtcagttcatgatttatggcggaagtgccattctggccatactgctctggaacgggatcaccatgtaccaggaataccgggaaaaagaagctgcggcagaagctgcacgtcttcgtctggcaaaagaaatggcagacaaacaggcaatacagattgccccaccgtggcaacatttacctgaaataaaaccatttattgataaatgcattgataaatgggatgcactgcccttatcgatcgccggatggcgttttgaccttgctgaatgcagcacatccggtaatgacgggctgttacgcacatcatataaggaactgagcggcgttacggtcgaggacttcagcacacggatacgagaaatattccaggggacaaccacagcaacttttgtattgccagaaggcagcgccgggggattttctcttcctgtcagttttgacgtttcgcctgatccaattaccccggacacattgccacaggcaacagatattcaggaacgcctgacaacatttgcacaaaaaatgaggttaaaactcacctggcaggaaattgaaaacacaaaaacagatgaagaaggccgtccaataattctcccgtggaacgagtatgaattaatgattcagaccagcaccccgccttcaatacttttcgctaactttcatgaacctgccgttcgcttccagtatgcaggaataaaactggaagaaggaagactgaattatgagattaaaggtgcattctatgttaaaaataattaaaccaacgattatttctgtctgttttttcagttcacttgcttacgcaacagaatctgaaagcacaccaaaagacgaaataaaatattcatctccgaccattttacaggtagagcagattcaggctgaaacggtaatttacgaagcaaagctggcgcgtcagaaggctgtcagtgaattgcgtaatcttgatttgaatggtgtagcgtccgcaacgccagcaataacgccctcttccgggtattcttctcttgcagataccgatataccagcgcaacgtgtagccgctaaatcacttcgtgttattgaaatatttggtacaccacaacaaatgtcagcacgaatttctctcctggacgggtcagtaactgatgtcaaggtcgggcaaagtattcctggtacttcttataaggtggcatcaatcactggtaatggcgtctggattcagaatggtacagagaaacgccagcttattctttaatgctattgaaagagacgacacataatgtttttttctgacgcagactatcccggaaaagatatttctgatgttgtatacgtcagtatatctgaaaaagacgataaacctgttcaggtttatatcgctgataacagtaaaggacagcgtgctgttcaggcttatattggcactctgaatgttaaatatcccggacaggtaaatataacctcgacaactcttgatgttatcgcatcccgctaccaggacagcgaaaaaaggtctgattcaaactcatcacaacacttaaacagcaaccaggaaaaggtcattagctacctggcgaaagcaaacaaactgggaagttccgatttgcacatcacacctggtcgggacggctccgagttcacttatgtcgaagcacgcgtgcatggggaactggaaattctggatgtcatcccgcgtaaagaagggctggaattgctgggtgctgcctattctggaatgagtgatgttatcaaaggtacgcagtttgaccctgcaataccacaggatgcacgtatcgcagagaattttctgaagcctgtaaatctttttggggcgcgctattcgcattatccgtgcgtgggtggtgtgtacgcggtcttccgcctgattaaagatgacagcgaggatattcccactttcgaagaacttggctacatgccgcaacaaatccagacaatcaggcgaatgttacaacgcccggaaggaattatcgttttatccggccctacagggtccggtaagtcaacgactctgagaacggcttcagaagcctatctgagcacgtttggtttcaaccataacgataatatgcgtctcccccgaaaacgccttttcaccattgaatcaccgccggagggccgcattcccggcgcaatacagacggcagtcagggattccgtcgatggctgggttgacgcgattaaatccgctatgcgacttgatccagacgcgatactgaacggcgaaattcgtgatcacgcatcggcattagcagcaatcaaagcctcgatgacaggccaccttctgttgacgaccttacacgccaacgatgccctgaatattattgagcgccttgaaatggagaatattcaggccaggctgattgcagatcctcttctgtttatcggtctgctgagtcaacggctggtacaaaaactctgtccttactgtaagcgcacttatgctgaaatggcagacaaactgagtacagaagaacggaaactcattgaggaaaattgcctgccggaacaggtccggttgcgcaatcttgacggttgcgagcactgttataaaggcgtaacgggaaggacggttatagcagaagtcgtctcacccgacgcacgtttttttcagttatatcgtcagtccgggcgtctggaagcaaaatcatactggcactatgaacttggaggaattacccgtaatcagcacttattacacctgattaatcatggcctggtagatccgctgtccgcacacttcatatcccccattgacgaagataaatactcaatgctcccggaggggacatggcgataaaagatatatttgagaaactcaattcgatagaaattgatttctctggaatatcccactggctggcaaaatacacattcaggtattccagaataagtttatatgaagatttatctggaatgttaaatgatggcataaatgtaaagcgtgctcttacacacctgattgatgtagaaacagactacgggaagaaaacggggtcttctgcaacctactatatttgttgtgagtgccttaatgcactgaataacacaggggctatatcttcagcattaaaaaaatatataaaggaggatgaatatcaattaatatccagcggtgaaattcgcggcgaccttgccggaggattagttcaggccataaaaattgtcagaagtcgttctgaaatgacaatgactcttgttatgtcgatgatttatccatccgtactggtttttggttgtctggcaaacatgtatatggtccacgataccataacacctgttttcctttctctcgcaccgaaagaacgctggacaagttctatgcgattactgacagatacgtctggtttcctgatagaaaacggaacgtatattctctgcttctgcatcgtactgtttttcctgatcagatattcgcttgcgcgttatacaggaccgggccgtcagtatcttgattacattcccccctggtcactttataaaacatttaatggtgtaagttttctcttcaacatggcctccatgttaagtattgatattcccgttgcaaaagcactggaaaggctggagaaaaacagcactcaaaacagatggctactcgaacgaataaaagaaatcaggagatatgttttacttggacagtcacttgcaatggcaatgaaaagttgcggttatgacttcccatcgaaattatgcattaacaaactattacttcattctgaaaatgctgacaatgcattgatgatgtctaactatgctgataaatggctggaggaagcaaaaggaaaagtcaaatcaacaggagtctggataactgtagtatccgcattaattgttttcgcatttattgtaatgatgattactgctctctacgatgtcagtaacgtcctgcaacactaatccctaatatttttaacctctcaataaataaggaattatttattatgtcttctattaatattttaaatatgcgttctgttttttcttctctttctgcacgccgtaaaaaagaacaggacaaaggggcaacactgatggaagtgttattggttgttggtgttattgttgtacttgcagcaagtgcatataaactctattcaatggtgcaatccaacattcaatcatccaatgaacaaaacaatgtcctgacagtgattgccaacatgaaatcactgaaattccaggggcgttatactgacagtaactatattaagactctctacgcgcaaggattactgccatccgatatgatcgcagatacaactggcgcaagcgcgaaaaacccgtggggcggctccgttacaatcacaacctcttcggataaatactccttcaatgttgttgaggccagcgtaccgaagaaaaactgcatggcaatggtaaacgccctgcgttcttccagcgcaatctccaagattaacaacacttccacatcaactgtcgatgcggcaactgtttgctcatctgacagcaatacgctgaccttcagcactgattcctgatttttcatgtgcatcggataagcgccttcgggcgcttattttttccatgtttacaggaggagtattgtgcgttctgttctttatatcctgctatcatgtatttcatcattaatcttttcattgcaacccgcatattcagcgacaacgacccaatttgatgcctgctttgcacaagccgggcaacgttatctgattgatcccctgcttctgaaaagcattgccactgtagaaagttcactcataccagaccggataaatcacaacaaagaaaaaggaaaaatattaagcaccgattacggactgatgcaaattaattcatcacacatccccaacctgaaaaaacttggcgtaataaaagacaaatcagagcttattgataacccctgtctcaatatacaaattggcgcgtggattctggcaacacattttcagaaatgtggcataaactggagttgtcttggcagttataacgctggtttcaaagaaagtaacgaacagaaaagaatcaaatacgcacgctatgtctacaataaatacatggtaaggtaacttatgctaaacagcatatttaatacggcgatactttgctgtgcaaatatcgtctgtcaatgctacgcctacaatgaagtaaaattccgtttaaataaacttaatgtatcttataaaaccggcacagagaaatattactgtctgatactgacaacgcttgccgttctgtatctttcattaaaccagctatcactgattcaatctataatagtgattgttttctatgctttccttacattaatggcttgtatagaccttctttcatttctactaccacgcctttataccgtgacatttatcttctctggcctgttatatcagacatggaataacaatatattgtctggtttgttttgtgcaatgctgatgttcttcattatgctgtttgtaagactttactttgcatataaaaacggaacggaaagtttcggcatgggagatgtgctacttattgcaggaactggcgtatggtttccaacgcctgagattgcctgttcaattgtatttattgccgttatcggcggaattattttcttcactcttggcggattaaacaagcaaaaaaaatatatcccattcggtccgttcctttgtggcggaatgtttgtttactcactcgtaccgggaatattattctgaggattaagagcaatgaaaaagacagataaaggtgtatctcttcttgaggtattacttgtcatcggcataatggtgatggttatccctaaagtttatgaaaacattgaaaaccatctgaataatgttcgctggcagaatgcagcagaacacgcaaatacctataacaccgctgttcgtaattatgttgctgacaatgcatcaacactacttgctggctctttacccaaaacaatcacgccagcaacactcattcagaaaggctatctgaaatctggtttttctgaatccaattttggacaaagctacattaccggtattgcaaagaacagcaaaacatcccgtctggaagccctgacctgtagtaatggcggtcagtccctgtcagaagccggaatgcgctcggtagcaagcatgattgaagggcttggcggctacatcaacagcagcaagcaggcgattggcgcgggtggcggctggtctgacacgccttcaaattacgggctgaactgcgcgaccgggcatattgcaatggcacttgttggcgctgatttgcaggaaagcgaccgtttgtatcgttactccataaccaatcgtcccgaccttaacaggatgcatacggcgattgatatgaacagcaacaatctgaacaacgtcggcactttaaacggcaacgccgccgcgctctccggcgatatcagcgcacgtaacggtacgttctctggcgcaatttcaggaaatacagccacaaccaacggcgatatcacttcgaataatggctggctggtcacaaaaaacagcaaaggctggatgaacagtacctatggtggcggctggtatatgtccgattcgtcctggttgcgcagcgtgaataataaagggatttatactggcggccaggtaaaaggtggaactgtacgcgctgatggacgcctctatacaggcgagtatttacagcttgaaaaaacagcaacggctggcgcttcctgctcccctaacgggcttgtaggccgcgacagtacaggggcgatactttcgtgccaatccggtcggtggtctggtggcaataaagtgaactactccgcctgtaagtggtatcaatcatctgtagcaatgaatcacttcattggcgggaaaagtggaggatctatctactacaaacccattcaatgcccgaccggatttatcatgacaggtacacgcatgtatggcattggtgatggcgttgatgaggaacacgttgatgcttattgttgccccttcggttaaatcccagcaccaggaagattcaggcatgtaacagtaattgtgccgccggactcataatttccccacgcataattattcacataccaaaccttgttttggtcggagtatacctgctgaaacccaccaaaaggcgcaccattaaggtatgtccacgaacagtacgcatgtacgccaatgctcagatttcgggtgtttttcccgatattgtacgtactggtagtgaagttcacttttgccgttgtccagataccggattggcactggcccccgtgccaatccggtacgtggagaagggcatcaggtagcactgttctgacaggaaaaatagcaaatggacaacagatcccattgccatctggtttttctgccagccagtgtacctggagtgtcagtaatgcagaaaatccgcacgggtggaagccgaattattttgcggggtcagttgcaacctatgatgccaatcgaattgtgaaatgcggcttctatgacgaatacaacttttatggcggtactcaccgaactgacctgtcggggaaatgtagttacatcgtggtttgccagtgataagtatcgtcactggcaaatggcgtaaactgtaattgaaccattttgatcttcggtcgtgtcgcaactggcagtccatgcattgttgcctgaaggcatggaacgcgtgagccatataaatccggtatttgatctgcattgaccgcctccaccaatgactttcttgccagatggacatgttgccgttgctccaggccaacgccacgcagtagctgaagcggtaacaatttggctatcacctgcgccaatttttttccacgtaccggattggcacggaggccagtgccaatccggtgtgtggagggcattaggtggaaagctcaaggttactcaactttccagcactggttacttggggcaatttgacttttgtgccattgccagaatgggaaatgctgaggattctcattactgccaggtagtcgagagtccatctggttcacgaaaatggtacaaatacgagcacaagacaggttgtattgcgtcctgtgtaactctcaattaagtttggtatccaaaaactgaaaatacccctgagccacaagagtagttttgggccggataagaggtgatctgataagttgcgccagcagggacagcaaaagagatgaatgctgtcttcccataagatgggttgttgctcgcatttgtgctaatcaatacccctgcaacgtatccctgcaatctggatgtgttagcgcaatctcccccggcggaaccaccattccctccagaggcgtaaacaaacagcgtaccacttcctgtattgcgaccagtaaatgatcctctgtgtgagccaagattactgtaactaccgttagaggaaccggaagttctccacacaccggattggcacggtgatattgcatttcgaagcaagaatctctaccttccccccttttttgtctggaggggatatgtttcagaaaatcaaaattcgcaaaatgacaatcagccgggcgctggacaaatacctgaagacagtatccatccacaaaaaaggccatctacaggagttttatcgcgtaaatgtgattaaacgtcaccctattgctgaacgctatatggatgacattaccactgttgatattgccaattatcgggatcaacggttggcgcaaattaacccacgaacggggcgtcaaataaccggaaacaccgtccgtcttgaacttgccctgttgtcatcattattcaatatcgcccgtgtggaatggggaacatgccgcatgaatcctgtcgaactggtcagaaaacccaaaatcagtagcgggcgcgatcgtcgcctgacttcaggagaagaacgccgactttcgcggtatttcaaagaaaaaaatcaggctctttacgtcatttttcatctggcgctggaaacagcaatgcgacaaggtgaaatcttgtcattgcgttgggaacacgtcgatctgcaacatggggtagctcatcttccaacaaccaaaaacggtgctccacgcgatgttccgctatccaggaaagcccgtaattacctgcaaatgctgccgacacagcttaacggtaatattttttcttatacctcttcgggattcaaaagtgcctggcgaacagcacttcaggaactgaagatagaaaacttgcattttcatgacctccgtcatgaggctatcagccgatttttcgaacttggtacattgaacgtcattgaggttgccgctatttcaggccatcgctccctgaacatgttgaaacgatacacacaccttcgggcttatcaacttgtcagtaaactcgatgcccgacgcaagcaaaccagcaaaatcgctccctattttgttccctacccggcaacggtcgagaacagaaacgggcaagtcgttgtgactctgagtgatttcgacctggaaacaagcgcagccacaaaagaacaggccatatttcatgccagcgtgttgctgctacgaacactggcacaagccgcccagcgaggagaacgcgtccctactcctggcgaacttcctacaaacattgatgaacgggtaatgatttgtccattaacaaattagaggattcacttatgatagaacaactacagagtgattttttattctggatatttatttacttcctgatagtaggtttgcttatcagaaacattcatcttaccagaaaaattaaatccatcgaaaaaaacaaaatgttcccagcggaggaatatgctgtcctggacattgaacagcatatgtccaataaatatattgggcggctagtaacccgttttatgaagagaactaatggtgcacctttgttaattgtgtttccagaatacgataaaggagacaacaatgaagacaaaaattctccaccattccaacttgtaaaactaacatccaacatcaacaatattaaagaaatttattccaatgatgacttaaactgttttctgaataatatttcggcacaaaaaaatttatatacaacgcactctggacctagccaggcatggattgaacatgcatatcctttgcaacaagtaactattctcttacaaggcactcgtcatagtgaaagggaagatataatcagtcaacttgagattattctttccagactaaaaaatggagaaaatacaggttttgagcatgacgatgattttggatattcatttcagtatgatgccgcagcagtaggaaaatcatcatttttcgatgaagcggcaggaagaaaataagaataacgctctatccattgcacagacaaattaacgttaatcttttatgaaaatcttattaacaatatttatttatctgcttaccgcttttcagtctgcaaatgcaggtggaataccttatacatttaaccagaaaattcttcaggggaaagttattcgcgttctcgatggcgacaccatagaaattaaaacactacccgcaaaaattgttgtgtatgaagttccgatccgagtccgattgataaacatcgatgcccctgaaaagaaacaaccttttggacgctggtcaactagtcagcttaaaactctggttgcaggtaaacaggtgacagtctcttattcacataaagaccgctacggacgcattatcggtcatgtgttcacgacgaacggcacggatgccagccgctttatggttcagtctggcgctgcatgggtatatgaacgttacaacgtggatgagtcattaccggctctgcaacgggaagcgcaggaacaaaaacgtggtttgtgggccgatgcaaatccggttccaccgtgggaatggcgtatcagaaattaagggggcaagaaaatgcattcttcttttggtttgccatgattctgtctttttatctttgtgcaatattaaaggcttctttttaacagggggcggcatgtatgtaattaatcaacagacaagggacaataatattcttacgttgcatgatgtttttaaaatctatcaaaatacaggggggcttcgtcttgtaaaaacagaggagaatgaaaagtacatctccattatcatttgtggcgtttttcgtattagaaaaaacaaaaagaataacaaaatcactttgtggggatacaagctaagagataagcacactggggtatggaccagaagaaattcatttcctggtaagatttttttattctggtctaaaaaatctgcatacgacatggacgactggttaaaatatgcgattagctacatcatcaaatcattgattgaggctggatattcaattgaagacaaactctatttgttacgcattggagaggaagaggaaaacagcgagagtcgttatatttccacactatatccatccaatgtatattactcatatgagtatggaatacatgacattgttcattgccttggtaaaatagcatcattcaactacccctataatacacgatatatcagcagacatattttactcgcagagataaaaaacaaaatttatcagagagcattaaaaattataggggtggataatgaatttaatgcttcaaaagcattgagtaaagctatatggataatggtagataaaaagatatttgcacaatatgccagagcttcacattgttcgatagcttacaattcaattcgtcaggcattatttgaggactatctggatttttcaaagcgaatccatattgtgaatgatatggattttttcggattgtggcctatggttggtcgtctaagacaacaacataaaaatggtcagtttatactatctggaaagacaaaagagttatatgaaaaaatcagttttccctgcaaacttagttatggtgagttcagaagtttacgacatgttagtttgtcattagtatatgctttaaatgataaacatgataatgcatcattcagatttacagtcagattattacgccatccacttatcaagaactatcctgtgagagcaatttactggattatcgattatattagcattcgagcttactcagaaaaagaaaatgatatttatcgtatatgctcaaaatggctagaatatcatcgtgatttatttaaaaacattggcttttatgaccgtaatactgaatccaggcaaacatcacgctgggaaatggaaacgaatcagttgtgtcatgcaattgactggttgttagcagaagaacggttaattcataaaaaccaggagtggccttctttctggagactatctgatgaatggacgcgacaagtgaagaataacgttattcccgtaatcccaaaatggaaaggaactgggataaactggcagaaagttgataacggtgtaaatgaattaattacatttgatgctctgtgtcaggaaggtcaggagatggaacattgcgttgccagttatgcagactggtgtgcatctggagaatatattgcaatttcagtcctgatggataatgaaagagccactcttggactttcacgaaaagaacatgatttaacctatcagtttgaccagatgagaggtattcgtaatcaggctgtttccagaaacatgctaattaaaggcaggcatattttaaaaataatcaactcatcactaaaaagataatgagtcatcgcatctcattacagcaccgatgactgggtgtttattctttctgaatacaaaaactgactgaaagataaggaaagaaagttttcttacctgtttgtcttacgcaatggtgaactggttcaccatgaggtcaacaaatcagagcttctttgagaggtttaacatgcaatatgcattgcttgatggatttgaacgaaagtttttgctggatgctcttgaattcggtgttctgaaggactggaaagaaaatccggtaaaagaacttcctgatattgatgaatctgctcaccccttccatgtctgttatggtggatatttattaaatcctggtgtttcagattcagatattagcagaaaaataaaagaccagacaggattctggctggcagctattgatgatacccgcatggattgtcattcaatagcttattatgatattcacacactccctctgatttcgtgtggtcatcaaaagatagttccttttgccgcgttaataaaagctgatgaatgcatcatttcaaaaatttcttcgtattctggttttgccgtaacagcctttttgagaattaaagaccaggatattgcaactaatatacttaaccgtgaggggatttttgcttttaatggctgtgaacgcagattcagacatccagtaagtgaagataactggcaacaggcagtatcagaagaacgtgctatccgttgtgccaaaagattaattcaatgtaaaggataacaaaatgaaactttttatcgcagaaaaacccgcagtagcgaatgatattgttaaggcgcttggtggcaattttacccgtcatgatggctggtttgaaagtgataatactattgtgactaactgttttggtcatattatcgaatcacagccccccgaaaactataatcctgaatacaaagagtggaagattgaaacactccctttgcgtctttatcccgtaaaataccagcctgtagaaagcgccgaaaaacaggttaaaacgattattgagcttatcaggcgtgctgatgtgaccgaaattattcatgctggcgatcctgatgacgaaggacagctacttgtcgatgaggtcctggaatatgcaggcaacacaaaacccgttaagcgcgttctgatcaacgacaacacccttccggctgtgaaaaaggcgctggcaaatcccaaaaataaccgtgacttcagaggactctatctcaaggctctggcgcgttctgtagccgacgcgatatacggtttatccatgacgcgtgcttacacaatcccggcaaaaactaaaggctataaaggtgttttgtctgtcggacgggtccagacacccgtgcttggcctgattgtaaatcgcacccgtgccaataaaaatcataaatccagcttctactacaccatgaccggacattttcaacgcggcgctgatgttatcagggcgaactggaaacctggtgagttcgcaccgctgacagaccgcaaattgcttgataaaacctgggcgaatggaacagcaacatcacttgcaggaaaaccagccacagttgaagcggcagcaacagatgataaaaaaacggctgcaccgttgccctttaacctggtacgacttcagcagtacatgaacaaaaaattcaaaatgactgctcaaaaaacgctggatatcacacagcagctacgcgaaaaatacaaagcaattacttacaaccgttcagattgttcatatctttcagacgaacaattcagtgaagcaccacaaataatcgatgccctgaagtcggtgtttgatcagccaatggatattgatacgacacgtaaaagcaaggcatttaacagcgcaaaagtaacagcgcatacagccatcatcccaaccgttagcgtaccggacgtaaacgcactgagcaccgacgaacgcaacgtttacctggcaattgcacaacactatcttgtccagttcatgcctgaaaaggcatatcaggaagtatccgtcgccattcagtgtggtgatgagtcgttttatgcccgtgccaggaaaactacagacagcggatttgaagcgtttcttggtgtggaaaatgccggggacgatgaagcagaagtcgaaaatgatgattccgcttttgatcttctctgtaaaattcgcacaggagaaacagtgacgacaaaagaagtggttgtgaatgagaagaaaacaacgccaccgccattattcaccgaagccactttacttgccgcgcttgttcgtgtcgcagattttgtcactgatccagtgattaaaaagttactgaaggataaagatcgggataaaaaagacgaacatggcggtattggtacgccagctacgcgggcttccatattggaaacactgaaaaaacggaactatatcaccctggaaaaaggaaaacttattccgacagataccgggtatgcgcttattgatgctctgccggatatagctgttaatccagatatgacggcattatgggcggaaaaacagacactcattgaaaacggagaaatgaccatcgaacagttcgttgacgaactgtacaatgatctgataccgatgatcagtaatgcgaacagtgctgaaataaaagtttcccccagcgcgccgtctggtcagtcacaacgcctgtcctctccttgtccttcctgtggtaaacagattgttatcaggccaaaaagctattcctgtacaggatgtgaatttaagatatggaaagatttctgcggcaaatcattaaccgataaacaaattgaaacgttaataacaaaaggagttacaagtgaattgaaaggtttcattagtcaaaaaacaaacaaagaattttcagcaaaagtaaaactggttgacaaagcaaccgggaaactgggatttgagtttacacaaaaaagtaagaaataaatccagcagtagaaatcaaacatcgttgtagctactataggacaaggatgttcttcaggaattgtacaatgaaaacaaaacaagactggctctttcagttaagacgttgctcaacactcgacacacttgaaaagattattgaaaaaaaccaaaacagcctccccccttctgagcttgagtcgtttaatgccgccgccgatcacaggcttgcggaactcacaatgaataaactctacgataaagtccctccatccgtctggaaatatgtatattagttttcatctattaatattagatgtttgatcgacacaaacatcagcaatccctatacacctttcatagaatgaattgaaccctgtatatagcctgtctgaaatggatatctggcaggctatcttaatagtgttataggtggtatgaatgtttttcctctacgagacctacaatttcttctactacctgataaagttaattgtcattcagccacaatatatttgtgtctatatgatattcttttttttcaatgcagggatagcatatagcatcaccaatgatatcgaggatcaagtatgtcgatggcttttattcgtaagtatgttacatgctctgatgattccccccgcagttatcatgccacttatcatgccaccacaggaaatacttcaggaaacagagaaaaggcaggaactacatgaatcaatacccaaaacatgcaaattaaaggcactggatgctcaacaaggtggtttattcggcgttgataaagatgaatgggtattccctgacaataaatcattctatctgcctgaaaagtaccgtccagaaaacaggattacggaactagccatgatgaaagaaggataaagacctatgaagatattcaaattgtttgttctttgtatcccccttctgtttagtctttttttcgctggctacggcattttgtcaaaaaatccatttgaaacactaccgtgtctgtccgccagtgctttttgcctttttctgtttgacatactgaggcgatcatttatgaagtgaggtgtcttgatgttaacgttgaggttgagaaagttttgttggttcttataattatagaccggattaaatcatgaaagaatacgaaaaaacggctttaatatattccttaaaggaaagcaatacattagttcttcggattatactaatctctattttagttgtcggggtgatttcaggcgcgatatacttatataacttggcgatctcgttgtttgattcaaacccaacgtctgtgcaattcaccttttgcggagtaggctgttttattgctctattacttcaatggatatctaatgttgatgcaaattacagagaaagaattggggagcaaccaagtacaataaaaaacattgtacaatatttatttgcagccattattaccattagtttcattacaatggcattaacagccatattagtcttaaaagactcgtccaacatatggctcaacattacttttattgcattattactgtccatttttgtagctattatttctgtttggggttgactttttttcttaaaaagcccgaaaaccgggcttttttcttaattagtgcatgtcctgtgaatcgtcacgctgctgctgcgattcctgatgatcttctctggcctggacaaattgttttccaagagcatcttctgccatttcacgagtgaatccgtgattaagcaaatcggattcggccttctccctttcgaacttcagtccttcccctctgaacttgtcctcaaagcgatcaattgcctcaagaatcttgccgtcttccggcgtgcaatcccgtccctgtgctttctcaatttcatgacgctccacgcgttcagcatttttcattacagcgtcaatcccctgagaaatatgttcagactcgacgcgataaatgacagtatcgcgcttattgagatcatgtagctcgcattcaacccggccccactcaatagcatccttgagagagctgaaatcttttatttcagcattcagaccttcatgtgttgagaaatagacataatccttctgttgttccagtttattcacattttcaatagcccttgtactgaaatggatacctgtaattaccggaacacgagccgatgtttggtcccccgttaaaacttcagaaggtgtttttccagtgatcgcggcaaattgctgctccgtaacatccactctggcaactgcatcaccacgctctaagccatgcttaccagcgaccgcaaggcgataaagaccaccttcccccctggtaatttccgcctccacaacgatatccccattgcaggaactgaactgagaacggtctttaaccaggaagttttcaagcccggagatcatatgctcgttagctgaaatactggcgagtatctcttctggtgattctctggacgaatcccccgcctgttccatcactgccatattagcgtcattaacagcgtccttaattcctttaaaggcgatttcttctcttgttacaggtgtgattaagatatcatcctggttaagcccgtgctcctgaagcatcttatttttatattcagatgcgtcgtgcaatgactcaaaagtcttaatatcttcactaaactcatccttcgaaaaagaaaccgcatacactggagtacggtattcttcatatgaattggcaattatttcaaatggcctatcaaacgttactaatgccccctctggataagaggataattcatcggttgagacagttttagacataagcacaacagtatcaaaaccatcaccatttaaataattgctttcatatttttctattgcagaagatttgctttcctcataacactgaatagccgcatctttagaatgaaagacgataccttcattcaaatcatggaagcgactaaagtttatacaataaatttcctgtttattatgcacctgcgcagtagcctgatcgtgttgagtagtaagctgctcctgaatcagagcctgtgttctgtcaatacctaactcattcacaattttgcaaaattcttttgcgtcgttttcattatcaaaactggcaacgtcaaaaatatcatcgctgtctccaggtacatgtcccagcacttcccaaatctcattttcatcgctatccagagatttcaaatagccaaattcaccatttgtgcctttactaagcatctgtgaatccagggtgtttgccctggtaataacaccaggatcatatgaagatgtggcctgctctgcgacctgtgcttgctccgcgacctgtgctttctccgcgacctgtgcttgctccgcgacttgtgcttgctcggtggcctgtgcttgctctgtggtctgtgcctgttcggtggcctgttccttcaatgcatcacctttctctattctggattcggactcctggctattttcctgtgtttccacctgctcaaacttattaccctgaagttctgcttttaattccagcatcatctgttgatactgctccgggcgtaaaataatcttcatgtcctgctctgcggcaacttcagcgcacatttttttgaaatcttcagagccggtaagtttgagtacaccaccaaacttttccctggaatactcaagcattattccgatctcttcttttgagggatttttacccgcaacgacaaagttccctttgtcggtaaagacaggcttttccgattcctgatcgcgataaacaatcctggaatcctgcttatccatcacaagatcttttagtttggtgttaacctttttcgcctcttctaagcggcgctgggaatccaccgctttctgaagcgaaagttcgggttcgtcagcagaaatggcgttgatttcatcgaagttgagatagcttttgagacgttcaagggctttcatttcatctttatccttatgccagtcagcatgatattgacgaataatgtgtcgcccatctgtgtcgagttcagaaagacgctcaagtgtggttagttttttgtaaacaatcacacccacggcaatatcacgctgttcacgtggtattaacttcaactcgcgtctcatctctcgcagatcattatacagcttgccacgctcaaacctgatagtatttcgtaatgttttttcagataaattcagtgagttaagacgctcacgagcttcatgatgcgtaaggcgtctgtaggttggatagcgcgtatatggcgtgttttctaactgctgtgaataaacttcaagcagaaaggatttcgcatctttccaggcaagattaatatgctttgtcagaaaatcagatgcgttcatattacgattccccacagaaaaccggggggaaccgtcctttgctgttctgattttatgctgcgctggaataatattaaaacgctcggcggcagaagacagaaacctgacaggatcaatatttctgcgaatttctgccatcgttgtaatttcgtttttctctgccgcctcattcagagtctgaaacatcgtttcacacaaaaaagaagagcgttcaagactttttattcctgactctgtgaattgtctatcataatcccgtcgcacatcctgaccaggatgttctctttgcggtaattgctctgccagatcacgctgcgaaatatctgacaatacactgatagagtcgggtcttgtgaatccattgattccgtaaaccataccgcgttggggcatacgtgacaatccgactgttgcttcagattgacggattctggcaaactttttaggacacgacttgtaacctcccgctcgtcctgacgtttgctgagaatttctttcgttaagtttttctcttgagtcatattcttttatcctctctttcagaaattcaatctgctctgcttcagataaacttgtatagtccttacgaacgctggcgttgagaaaaacatgtttaatctcgtgactggttttgtttacccaggtattgagacgtttttctatttgcttaggcgtaggtttttgaagagtcaactttccctcttcaatatagtttttacgaaacaacgggcttttcagattagtgaactttttatctcccggtaacttaacagcaatatattcactggcctttccttcatttcttatcctaacctcaccatattctgcaacaatctgtttgaatacagcataatcacttactttttctttttcaattcgataattcaattcattcttaaatgcagaattacgctctacatcaagatctgcttttactctctttaaaataacactataatcactattttttctcggaaagtccttcgggctggcaagattatatttattgttaatatgctcctgtattgcatctagctgttcgatagtatgacctttccctataaggccaacaggatcaagtttatctcctgtaactagattaacctttggaatgacaatatgaatatgaggctttctttcaattaactctcctgtactattatcctgaatatgccggatttttggcaaatgtgcttcagcatagaaagaatattcttcaggatgataagcattcatcaataattttttataatcatccacaaccgcctttaacatttcatttgatacgtgactttcatgaaaagacaacgtaatgtgcaaataacggtcctgtttgttgtcttcaatagaattgataatcttatctgtagtctggagatcaccatcaagaacaacacgatgatcaagttcatcacgtgtgtactgacgttctgctttgcgaccatttatcaggtaatcaacaataccgtcattaccaccaccatatctgacaatcatttggctatctcctgaaggcgatcacgaataccaatcagcacatttaaaatctttttataaagcgcctctgatataataccctttaaatgatctgagtttaagcggtgagctatctggttaatattattcccagcccaacttaactgagaaagacaccgtttgtattccgggatatggcgtttatctgatgtgtagttttttattttaccaatagtaagcagcctgaaaaattcagacttactaatttcaagctctctgattgctctgtcaaatggagcatactcttcttctgtaagtctgaatgtcacatgaacacttttgttggcttttttcttcataagtcctcaaggttcgtagaaccgcactagaacggctgcgccgttcggggttgcaaaggggcgtcccctttggcacaagcattgtaacatgcccggaacgggcttgtgtacaaagcttatcgtgcctgtgttttagaaggacaaaaaaatgccgtgcatacagcccacacaatgactcacataatcacccacaactcaaaacacacagcccacacaatcacccacactttaacccacaaaaaagaccacaaccccattgacaacccacaaaacaacccacataatcacccacacaaacggcgagcaaattgctttaaataaggtattatgccaatgtaggaggtagagagagagaggaaatgtaacaaatgaaaaagatcgagagtttattatctccaatatgcgaggctataaacgaaacaaaatcgaaatcaaaacaggctgtcttcaatatgtatttgcaaaatatacttgaagcaaagaaatattatacatgggagcaaatagctgattacataaacaacaacaccaagacagaactagcccaaaagacttatataaatatgacagagagggctaaaaaaagacaaaaatgcactgaaccaaaagaacaggcaaaaaccatagatgtaattgttcagaatgaagctaaaggcgatgaaccgagagggggggtaaaaggttttttttcaaacattagtgagaacaaaaaagaaatagagcacgatccaagtgctacgaatgaaaaatttataaataaatatctttaagtaaaggagcattataaatgaaaaactcaatcaatttcatccttcagggtaaaggtggtgttggaaaatcattcgcgaccgcaatactggcacaatactttattgatgaaaatcacatggataatatcgtagtcggtgacacagacccggttaatacaactacggttaaagtaaaaagattaaatgcagatttgatacaaatcactgaaaacagcaaagtaatacaatccaaattcgatccaatgttcgaatcgatgctgaccaatagtcagaatacttttgttattgacaatggcgcatctacatttttaccgttaattcagtatttcaatgataactgtgttatggacatgtttgaagatgtagaacaagacgtttatatccatactgttatcgttggtggacaagctcttgcggataccttgcagggatttgaagaactgaaagaactggttaaaggaagtaaggtaaaacttattgtctggataaatgaatttcagggtattccagcacttgaaaatatcccattaatagaaactaaattcattgaaaaaaacaaggatgtaatcgctggcgttgtggttattcaggacagaaaaagtgatgcctttgcctctgacatcaaagagctaacagaaaaatcactaacactgaaagaagctcttgagtccgaccattttggattaatggctaaatcacgattaaaacgagtcttcaatgacatttacaaacaattagatagcatctatgacgatgaatacggtgaataatatgagtacagttaatcagccagaattaaaacagcctgaaaaggctgtttccagtgaagatattgataattttattgttgatgtattcaaggagacagggcataaaatatcaaaagatgatccagttatttcattaatttttctgaaccaaaagatacaggaaaaattcagcaatgagttacaagctaacttcacagccctgtctgagggcttcagacaggtcgtttcatctgtagaaaatgactatattcaaagattcaagaatattgttgagacgtgcggcgatctggataatgaaataaaagaaaaagtagaagagggaaaaaacgatctaaaagaaacaagtgttgaggtaaaagaaaaattaacagatgatattattgaactcatatctggaattaaacgcaaccaggaaaaaaacaacaaattatatgaagaaaagttgaagtcattatctaaggctgtaaaacccttcagtacaagaacagccattgcaatttgtgccttgtgcacattatgcctgtctgcggcattttctggcgcaacctggtatgttgcacaacatgaaaaagaggcaagcctgcgcttctatgcaagagcttttcttgatatgaaaaaaataactgaagagagcatgagaaaattaccaaaatcagaccagcaaaatataaaactcaaactagacgaaattgattcaagaaaaccatagatatgaaaaggagtcactaatgacaacttttaccgacgacgacaagaaactaattaaagaaatcagggagcgaatcggcagcctggacgtgcgagacaatattgagcgtcgggcttatgaaatttctctggcatcgctggaagcagagccagttatgttctgtatatcaggacaaaatgtagattcagaagaacatgtatcaaccagcaaagcggttgttgatgcctgggttgaagaatggaatcaggttgacggaagtcctggcgaaccactgtacaaaactatgccactctactgtcacgctgccttgccagcgccggtagtgcctgaaggactggttaaagcggtgcgtttttatgagcaggtaaaaaatgagaatccgccagttgggactggtgcgtggaaagacgctgttgactgggtgctcgaagaggcttgccaggctgtaaatacagacatcaaaggatgaacgatatggcaaccaacaatcgtaaagccaagatgctaatttcccgtgtatacagactttgctaccccagccagtggttgagagttagcaatcgccgtgtggtgttgttctcattttctggaattgccagagagggaatcaaagataagcgcagcgcggcgcaaaaccgctggaaaaacaacttgcgcactaaaggagcctaatatggctattgccgcaagttacaccatgcatctctactgtgattgtcgccagtgtacaaatggtaaatatcagtcgccagacttcggtgagtatatcggtacgtcatgggctggctgtgcaaaagaagcacgtaaagatggatggcgaataagcgccgacaaaacacgtgcttttgcgcccggacataaagttttgaggattaacaaatgacaacatttaccgacgacgacaagaaactaattaaagaaatcagggagcgaatcggcagcctggacgtgcgagacaatattgagcgccgggcttatgaaattgctctggcatcactggaagcagaagcgccaaatttgcctggtggtttcacaattgaagaagcaaaagaattacacgaaaatctggtaaaaagtcacgtaagcaaggctttaagtggcgaaaaaatgaaaaaagaaaatcgtgatgccgatttgcgctggattcatggcgtaatagttcaggccgcgtggtttgtgaaagcatcactagggcagaatgcatagtgcgtacctgcttttctcctggcaacggtggatcttccgcttcctcgtcactcgctcgctatgctcggtcgctggactgcggcgagcggttagctatcaaaaaaaatccccgcacaacgcggggatagttttatttatatgcaagttcatgacgtgccgcctgagccagaaaatggctacgatctttgtatacgccgccactttctctcacatatccatcaatacgacgaatcaatacatcaggcaatgaaatattaatacgttgttgtttgccctcaatttctgacaaatcaacatcaattacaaaccagctatcacagtggttataatttgggttggcggaataagtcaaacacccttcatcatgaatatcatcaacagaatgagcaccgcttattaccatctcttccacgattgctaatatcgcttcacgcgccattgcgggtatttctgcctgagaatcagcagcagaaacacatccaaaatcaaagcaatcaaaaaccggaacggtgataccgtatgctgtatgatcatctttcggtgtttcgacaccaacagaaaagaacatggctacctccaaagtcggcggggattaaatccccgccatttttttgatcgatctgacagtacctagcggcaagtcctttttaggatgaggaacaggaaaagtttttcctgttattggcgaccaccatatctggtgactgcttgccttatgccgtttcaactcgcaaccagcagctatcagttctttcaacaggtcagcagatttcatatgtcctccctaacctgaaaacaattatacacacgcatacacacaaaagcaaattatttcattcgtatgacttatgaaacacactgtaaagacagttcaatctttacagtgtaaatcatttatccagttttatcgctatgcatgtgatacatagaaaatcatatagtgttttactatatgatacctgattgacacttttaactgcacatctcatcatttacatcgtaaagacaaacatagctttacaatgtaaagctatataattaaacactccgtgtccctgataaggaaaaaaaatggctcaaccaaccccagaaaagatactggcaatcatagatgatcatgatcgcgcacaaaaaaaacaacgcaacaaaaacgtcttcatttatttatgtctctgcttggcaattattggagtggtcgcgcattcctttatatcaacgtttcgtcttgatggtgtagccgtccttacaattcttttgggcgtgtcagcaatcgcattttttctacattatgtagaatcagggaaaggccagattcttagcagtgaccgcatattgtccatactcgctcaaaccaaagattaccccacaattcgacgtaaagttgttaatcgcttgctctccggttcaaaactcacgggtaaagatgaagagtacatattcagtgaactgaaaaaggctgaacaaagcaacgaacgtgaaaagagattgcaagcaattaaagagtatacatcgtaatacaacgtaaagcatcacttgtaaatacaacacactacatcgtaataccagaaaacaccaacgccagcgagcaacaaaaaggggcgattaagcccctgcgcgatgattaatgacttctttttccagtgcctagctctggatcaagcctgacgttaaacacacctttaaagggcgcgtcaggctcctttccgtcctccacacaggactgtaaatacaaatcaaccgatgttttaaattcccgttccaggtcagctaatgtttctgcctcaaaagtcaccagatctcgaataaatgccagctttccatgcaggatattattttcaaaatccggctcaactgtacctaaatatcctttatattttaaatgtttcataaaaccccagcctctttcaagaaaagttatcagatagaagggtgaaagaaaataccagggagcagcgaggccacatacccctaagcgcagcgcaaccgccggaaaacgcaccacactgtaaagacaataaaatctttacaacgtaaagctaactatgtaatacaacgcgctacacattgacatcctccacgccctaaaggacgtggattcctacgacgttcaggctgtcgcctgaatcatttcggtgggttcctgcttcaacgagcggcctgactgcaccatctctccacaggcaagaacggcgtgccccgccgctaaaatgttacgagcgccatttacatcggcgttcgctgtatatccacatacctggcatctgaattgactttgtgacaggcgattttctttcgctgtatgaccacagcacgtgcaacgctggcttgtgtacgctggcggaacagcaagcacctgaccgccacgccagagctgcttgtactcaagctggcggcgcatttcataccagccctgatccagtatcgaacggtttaaacctgattttgcccggacattgcgccccggctggctgaccgtacccgctgctgactttgacatgttgctgaccttcaaatcctcaatgactatcattgcgtggtttttgctgacggtcgttgtgactttgtgaaggtagtccctgcggatatttgcgatacgggaatacagtcgctgtattttgcgtttctgcttctgccagttgttgctgaatttgaccttgcggcttaactgtcgctgaagtctcgccagcgtcttctggtttttctgaaaactgtttacaggatcaaaaatagtgccatctgacagcgtggcgagtttagccacgccagcatccagcccgaccattgatactgaagggtgaaccggagttgatacttcactttctgtctgaatactgatgtaccacttaccgcaggactgactgacagtgacatttttcacaacgcccgtgacctgacggctgttccggtagcgcatccagccaagtttcggcagaaaaatacgactgttttcctgatcgagcttaacgccctgcgggtagcggaatgcatcattctgtccccgctttttgaatcggggaaaagccgcccgcttctggaagaaatttttgtaggcccgctcaaggtctttcagtgactgctgcaatggctgtgatggggcatctttaagccattgggtttcagtggcatttttccactcaaccaaccacgaggccatccttgggtaaggaatatatttgttccctgcctcatggttctcattctgaagcgccagagcacgattgaaaacgaaacgacatgcgcctgcgaagcgcctcatttctcgctcctgttgaccaccgggtcttaactggaatttaaatgcctgtagtcgtttcattcgaccattttaaacaaaaaaagccaggtggaaaacctcgccttatatcctcgccctgaaggacggggttttacggcgcactggataagaaagggagagcattacactctccctatatatgactcaaactaaagcattatcccggttatgcgcccaccaaatgatttcgctaataatccatgcttctatcgcgggtgtttttacaggttccccatttacaatgcggtttgcaagctctatcatttcacatactgacatttgagaatctccaaagatgcatctgtcatttggtaacaggctgccccacagcctgttaccaaccccaaattagtatttgctgattactttaccctccttaatcatttttattagttcctgttcagaatattcttttccgtgttccaatgtggaatatatatcgccaatagtccatactccacactttttaatttctgcatttagccaggattcatgcagaataaacaacggttcgcaatcatttcctttttcataaacataaatagattcggtatcatttccagaatcagaagtaccaacgactttttctatatcgaaatgtttttttagaaaagttgtgaaatgcattttcatgctcctgccgctgagcggctttggtggttggggaccatcccctcccgatgtgtttataataggtcagaactgacctattatcaagtatttttccctccattcttcaaaaaaaacaccatcaaatacatatagttatattcatgtgatgcccgacagggcatggaaggggcgaaagaaaataccagggagcagcggggccacatcgccccgaagcgcggcgcagccgctgacgaacataccaggatgcacagggccatcccttcgccctgcaaagccagaacagaccaacaggccatgatcatgctgatttgcgccgcagaatgccgcagttagcgcgagcgacagcgagtttacgccgtcctggtgcattacagcagggcggggcgctgtactgcgcgtgtgagcgtcagcgagctacgggcgcaattgctcattgttcaatgcaactggggctattaagtccagccataaattcagttatggtttttgtagcttattccgtgatttcgtcatacgttaattctattttcatcttaatattccttaattacttccagaatcagaattctttttattccttttacaaagtacataatcagggtgttctccagctaaaagcagaagaaatttaaactctactggtgtaagtgctgtaccgcttgcagttccgacaggttcttctttgcgacgccaggtacgcggactcatgctaaatatttcggcacattctttctgtgtcaggccaattttttgccgcagacgtttaatgttttctggtgtgttttcatttggcattttttccctcactcatttcctgaatcatcatagaaacaatttctttatcattctctcttaatccgtcgctggcaaagtcgatagtgtcgaatgccttctcatgaaaaacaagatcggcaacagttttcaccgttgctttcgtttttcctaaagtcgcagacttagaaaaagtttttactcgcttcaccagatgaaacgtatcaccttctttattcagataatattgtctgtcaccttttcttatcttcatattgagatagtctccccttttaacagtaaaggggcatatagcccctttcttttaactttttccggtaatcaaatcgacatcttcctgataaagctccccaagaaccggaacaacgccttttttataatcacggatattatggcagtctgtaaaaatgacgacataagcctcgcctgttttttcatgtttaaggcaaattgtgcaaagcgtcacgcgcacaacagaaaacacatgaccagttgtagagacgatagcaggaaaagtagattgtttcatgtttaactcctgccgctgagcggctttggcgattgggggccatcccctctcaatgcattaataataggtcacaaatgacctattatcaagtattttctagacgagctttattgaaaaatcattttcaataaattcatctaacatctttaatataccagctttatttacgaaatcatcctccataatttcgatacttgctgatatttcacatgtaaactcaatgctcctgtcaaatcccgcaatcccagctaatgcagacagcatatgataattatcaatatttatattaccaataagaactttcatttatcctcctgatatggggggaatccccccatattaaaaattacaatctggttgcaagtccggtttgttcattaaataaacattcaagctgatcacaataaatattatcaaattttgatatttcttttactgtagctccacggacacgggaaaatgtcaccaggtatgtatcagagaaggttaatttgattttaaccaaattaattcccttcattgcaaaatttgaaggtaaacgaaagcaaagaccagactcaccattttcatcaaaacaggcaaagttctttgcgcctgtcatagcaataaagcggtttccaccaagctgattaagaatttcagtagcaacaaatttggcgtggttttccatttttaagctcctgccgctgagcggctttggtgattggggaccatcccctctcgatgtgtttataataggtcagaactgacctattatcaagtattttttcctcctttctttaaaataaatatcgttaaatacaaatatttacattcatgcaatgcccggcagggcatagaaggggcgaaagaaaataccagggagcagcggggccacatcgccccgaagcgcggcgcagccgctgacgaacataccaggatgcacagggccatcccttcgccctgcaaagccaggacagaccaacaggccatgataatgctgatttgcgccgcagaatgccgcagttagcgcgagcgccagcgagtttacgccgtcctggtgcattgcagcagggcggggcgctgtactgcgcgtgtgagcgtcagcgagctacgggcgcaacattacattgctgcattcgcctggcattctccacgccttgaaggacggagttttactgcgcaccagataaaaaaaggggcgattaagcccctgtattcactattaacaatttaacatggttgcaggggataccccctgcaactattttcttagtagtatgatgtgaactcgtgtttttcttccggtgatcctttatatgctgtttcgaatgactcaatttcaattgctggcgtactgtaataatcacgcactcgccgttttaatggctcaccacagaaatcattgagtaatggggtcttatatccgctcattgaatgagtccgatgaactgaagcgcgaatctcctggacagttacggtttttttgccatgaacagaaataacctgatagaaattaacgttcgtttgctcatatccccaggaagatacaaacacatcgccaacagaaacagtgccgttattaaaagttaatgttttcatttttatctcctgccgctgagcggctttggtggttggggaccatcccctcccgatgtgtttataataggtcagaactgacctattatcaagtatttttccctccattcttcaaaaaaacaccatcaaatacatatagttacattcatgtgatgcccgacagggcatggaaggggcgaaagaaaataccagggagcagcggggccacatcgccccgaagcgcggcgcagccgctgacgaacataccaggatgcacagggccatcccttcaccctgcaaagcccaacggactgacaggccatgatcatgctgatttgcgccgcagaatgccgcagttagcgcgagcgccagcgagtttacgccgtcctggtgcattgcagcagggcggggcgctgtactgcgcgtgtgagcgtcagcgagctacgggcgcaacaacacaccaggcaaaatcgcatcctgaaaagttaccctgtaacatacacacaatgtaaagcgcaaaaaacaattacattgtaaagacacaaacatctttacaacgtaactataatgaatacaatgtaaagacaaataaacctttacactgtatatccgaggtttctatggggagagcattacttgtcgcatcagataaaggcggtgtaggaaaaagcaccacagcaacaaacctggcttcttatctggtaaataattcacgaacggtcatcattctgaagaccgataaaaacaatgatattcttagctggaacgaaaaaagaaagcagaatggcttattaccggttcctgtttatgaagagtatggcgatgtatcagaagtcattaagcgcctgaaaaaaatatgtgaagtgctgatcattgactgtccagggcatgacagcaaggaatttcgcagtgccttaactgtagctgacattctgcttactctcgttaagccgtcttcagatttcgaagcagaaacgctgactcatgtaacagaaaaagttcgcacagctcaacagatcaatccagacctgcaaccctgggtacttttcacgagaattaacacgacaaaaccacgccacagaaaagcagcgattgatctcgacaagttactccgggagaacccggtgtggatacagccacttcgtacacgtatttcagatttagatatttttgaagcggcctgtaatgaaggcgctggcgttcatgatgtacgtcgcgcatccagcctttctacagctaaagcacaaatagagcttttggcgcaagagttaggcatcaatccctaatggatgtaatacgacagctttacatcattagctttacacagtaaagctaatgtaatacacgaaaggtgatataatggctcttgacttgaaaactccggtaataccaggacaaaaaacagaacaaaccaatgcagacacagcccgattcatcaatgaagctacccgcaaaaaatcgggagcaactaaagtgaccaatgtccggcttggggacgtttacgaagatattctggaacgggaagcactgcgaacaggccagacaaaaacagcaataatgaaagcggctcttgcagcttacgaacacggcctggacgaaaacggaaaaaatcactggattctacagtcagccaggctgaaatgataaagcccttcggggctttatcccttacgttttaattgtttcttctcgctggctttcttacgggcatcgagaaccagttgcgcataagttgcgtgtgctttttttactgtaccagcaggtttcccgtaaaggtcgtaacgtgttgcgcctggtacagtacaattctgaagatattgccaccggaacgtcatcacctgaaccgcacaattccactcttcaatcgtcagatccacatccgggttatccgccaggtatttctcaacgtcctggagaatcccgcttttcaggggcaagttctttttttcgtctgtccatagttcaggaaaaacagcacgaactttattgaaacacttttcaaaatattctttcggatattttgggggaaaagtgatttgttttttcaaataccagggctgaggctgctttttatgtgttttctctgctacagcatctttcttctgtactttcttgttttcattaactgctgatttttgtacttcctgcggcttttcattcaccacaggattttctggcatgaccagaacgcggcgttttttgaccacaatcacgggtgttttttttggctgcatactcgcctcaataattgctgtcatattgactaattataccattttcagcagttaatatcctgaaaatacatggaaaagggggtatccgtacagaataccccctttgcaaaggcgcttaatgccagaaccacatcatccccaaaaaggcgggctttcgcccgcctccgggttgctacttaccgttggattcgtaagccagacttgccgtaacctccctgtttccatctttcagccggacctcgcacaaacgattccgggtcagatacgtgaatattaacaatgtgcagcacacgattaataaacaccaggtcagggcgtttttcggctgtttcatggccttcttctccttgcgtaacgcgcggtaagaggctatcctgatgttgttgaagcattgggatcgcctcgtgggtgtactgaccccaaaaagttggacagttaaacacgaggcatataggtctgattccgatattcaattggagtcagaccttttaatttcaggctaattcttctgctgttgtagtattcaatatattccgtaacagcatccttcagttcgcttatattactgaactcatcaagataaaaacactccgactttaaggttccaaagaaacactccaccacagcattatccagacaattgccttttctggacatgctttgtttaataccatgttctttaaggatattttgatatcttctcatacgatactgccatccctggtcagagtgcagaacaggatgctcgtgaggattaagctttttgaatgcctgatcgagcatattctcaaccatgttcatcactggtctttccgaaaggctgtaagaaataacttcgttgttgaagagatctattactggagacaaatacagcttgcgcccattgactgcaaattcagtaacatcggtaacccacttctcgtttggccgcgtagccttgaaatctctttggagaacattaggggcggtttgccctacctctcctctgtaagagcggtatcgcttgaccttaatcgctgctttaagtgagagggttcccatcaggcgctgaacagctttatggttaatctgtttcccttctcgatgaagagacagcgttaccctacggtatccgtatcggcctctattctcgtgataaatctcactaatacgctttttaacgtccgcatacttgtcaggcttgctgagagcctttagatgataataaaacgtactgcgcggtatctccgcagccctgagaagctcatcaagaggataaaactgccttagctcgttgagtactttcactttttcgtgggatgagctaaggctttcagcttttttagatacataagccgcgtttcaagaaatcgaacttgcctttcaagatcctcaatgcgtcggtcttttgacagctccaatgctgatgccgctttttctggatcaactgatattgcaatgtttcttttggtgccaatcttgagcgcgcgtaaaccagcttctccgcgctcttcatagaccttcagccacctggctacagaaccactaccagcaagcataaagtgagcagcagcctgattaagggacatgtgctgctcgatcacagctttcacgaccttaatacgcaactctggatcagcactaacgcctttaggtttgggaattaaacctttttctccatgtttttcatagagggcaacccatgtcctgacctgggttcgggggacaccaaaacgtgccgagatgatcctgtaaccatcatcagttgtgaagtagtgattcacgacttcaaggcgcttttcaaaagggtattttggctttgacatattaggggctattccatttcatcgtccaacaaaatgggtgcagtacatgggttaatgaaaaattaactacggggctttcttctttctgccgcacaacaagcatcagcagcagttccaggcttccggcaaggcgatcaacgacaaggtgcggatgtatgggcgcatcggtcaagcgttgattgaggccaagcaaagcggcagcgatccgttcgccgccatcgaggccgttatgccctgggacaccttcgccgccagcgtcaccgaagcgcaaacattggcgcggcctgccgactttgatttcctgcaccacatcggtgaaagctatgccacgctacgccgctacgcgccgcagttcctgggcgtgctcaaattgcgggctgcgcccgccgccaagggtgtgctcgatgccatcgacatgctgcgcggcatgaacagcgacagcgcgcgcaaggtgcccgccgatgcgccaaccgcattcattaaagactaactaccatggtccatatgaatatcctccgtcggggtttgtaccgtacaccactgagaccgcggtggttgaccagacaaaccacgactcagtcacctcctagctgactcaaatcaatgcgtgtttcataaagaccagtgatggattgatggataagagtggcatctaaaacttcttttgtagacgtatatcgtttacgatcaattgttgtatcaaaatatttaaaagcagcgggagctccaagattcgtcaacgtaaataaatgaataatattttctgcttgttcacgtattggtttgtctctatgtttgttatatgcactaagaactttatctaaattggcatctgctaaaataacacgcttagaaaattcactgatttgctcaataatctcatctaaataatgcttatgctgctccacaaacaattgtttttgttcgttatcttctggactacccttcaacttttcataatgactagctaaatataaaaaattcacatatttgcttggcagagccagctcatttcctttttgtaattctccggcactagccagcatccgtttacgaccgttttctaactcaaaaagactatatttaggtagtttaatgattaagtcttttttaacttccttatatcctttagcttctaaaaagtcaatcggatttttttcaaaggaacttctttccataattgtgatccctagtaactctttaacggattttaacttcttcgatttccctttttccaccttagcaaccactaggactgaataagctaccgttggactatcaaaaccaccatatttttttggatcccagtcttttttacgagcaataagcttgtccgaatttctttttggtaaaattgactccttggagaatccgcctgtctgtacttctgttttcttgacaatattgacttggggcatggacaatactttgcgcactgtggcaaaatctcgccctttatcccagacaatttctccagtttccccattagtttcgattagagggcgtttgcgaatctctccatttgcaagtgtaatttctgttttgaagaagttcatgatattagagtaaaagaaatattttgcggttgctttgcctatttcttgctcagacttagcaatcattttacgaacatcataaactttataatcaccatagacaaactccgattcaagttttggatatttcttaatcaaagcagttccaacgacggcatttagatacgcatcatgggcatgatggtaattgttaatctcacgtactttatagaattggaaatcttttcggaagtcagaaactaatttagattttaaggtaatcactttaacctctcgaataagtttatcattttcatcgtatttagtattcatgcgactatccaaaatttgtgccacatgcttagtgatttggcgagtttcaaccaattggcgtttgataaaaccagctttatcaagttcactcaaacctccacgttcagctttcgttaaattatcaaacttacgttgagtgattaacttggcgtttagaagttgtctccaatagtttttcatctttttgactacttcttcacttggaacgttatccgatttaccacgatttttatcagaacgcgttaagaccttattgtctattgaatcgtctttaaggaaactttgtggaacaatgtgatcgacatcataatcacttaaacgattaatatctaattcttggtccacatacatgtctcttccattttggagataatagagatagagcttttcattttgcaattgagtattttcaacaggatgctctttaagaatctgacttcctaattctttgataccttcttcgattcgtttcatacgctctcgcgaatttttctggcccttttgagttgtctgattttcacgtgccatttcaataacgatattttctggcttatgccgccccattactttgaccaattcatcaacaacttttacagtctgtaaaataccttttttaatagcagggctaccagctaaatttgcaatatgttcatgtaaactatcgccttgtccagacacttgtgctttttgaatgtcttctttaaatgtcaaactatcatcatggatcagctgcataaaattgcgattggcaaaaccatctgatttcaaaaaatctaatattgttttgccagattgcttatccctaataccattaatcaattttcgagacaaacgtccccaaccagtataacggcgacgtttaagctgtttcatcaccttatcatcaaagaggtgagcatatgttttaagtctttcctcaatcatctccctatcttcaaataaggtcaatgttaaaacaatatcctctaagatatcttcattttcttcattatccaaaaaatctttatctttaataatttttagcaaatcatggtaggtacctaatgaagcattaaatctatcttcaactcctgaaatttcaacactatcaaaacattctatttttttgaaataatcttcttttaattgcttaacggttacttttcgatttgttttgaagagtaaatcaacaatggctttcttctgttcacctgaaagaaatgctggttttcgcattccttcagtaacatatttgacctttgtcaattcgttataaaccgtaaaatactcataaagcaaactatgttttggtagtactttttcatttggaagatttttatcaaagtttgtcatgcgttcaataaatgattgagctgaagcacctttatcgacaacttcttcaaaattccatggggtaattgtttcttcagacttccgagtcatccatgcaaaacgactattgccacgcgccaatggaccaacataataaggaattcgaaaagtcaagattttttcaatcttctcacgattgtcttttaaaaatggataaaagtcttcttgtcttctcaaaatagcatgcagctcacccaagtgaatttgatggggaatagagccgttgtcaaaggtccgttgcttgcgcagcaaatcttcacgatttagtttcaccaataattcctcagtaccatccattttttctaaaattggtttgataaatttataaaattcttcttggctagctcccccatcaatataacctgcatatccgttttttgattgatcaaaaaagatttctttatacttttctggaagttgttgtcgaactaaagcttttaaaagagtcaagtcttgatgatgttcatcgtagcgtttaatcattgaagctgataggggagccttagttatttcagtatttactcttaggatatctgaaagtaaaatagcatctgataaattcttagctgccaaaaacaaatcagcatattgatctccaatttgcgccaataaattatctaaatcatcatcgtaagtatcttttgaaagctgtaatttagcatcttctgccaaatcaaaatttgatttaaaattaggggtcaaacccaatgacaaagcaatgagattcccaaataagccatttttcttctcaccggggagctgagcaatgagattttctaatcgtcttgatttactcaatcgtgcagaaagaatcgctttagcatctactccacttgcgttaatagggttttcttcaaataattgattgtaggtttgtaccaactggataaatagtttgtccacatcactattatcaggatttaaatctccctcaatcaaaaaatgaccacgaaacttaatcatatgcgctaaggccaaatagattaagcgcaaatccgctttatcagtagaatctaccaatttttttcgcagatgatagatagttggatatttctcatgataagcaacttcatctactatatttccaaaaataggatgacgttcatgcttcttgtcttcttccaccaaaaaagactcttcaagtcgatgaaagaaactatcatctactttcgccatctcatttgaaaaaatctcctgtagataacaaatacgattcttccgacgtgtataccttctacgagctgtccgtttgagacgagtcgcttccgctgtctctccactgtcaaataaaagagcccctataagattttttttgatactgtggcggtctgtatttcccagaaccttgaactttttagacggaaccttatattcatcagtgatcaccgcccatccgacgctatttgtgccgatatctaagcctattgagtatttcttatccatttttgcctcctaaaataaaaagtttaaattaaatccataatgagtttgatgatttcaataatagttttaatgacctccgaaattagtttaatatgctttaatttttctttttcaaaatatctcttcaaaaaatattacccaatacttaataataaatagattataacacaaaattcttttaaaaagtagtttattttgttatcattctatagtattaagtattgttttatggctgataaaagcgcttttgaagctggggtgggcgaagaactccagcatgagatccccgcgctggaggatcatccagccggcgtcccggaaaacgattccgaagcccaacctttcatagaaggcggcggtggaatcgaaatctcgtgatggcaggttgggcgtcgcttggtcggtcatttcgaaccccagagtcccgctcagaagaactcgtcaagaaggcgatagaaggcgatgcgctgcgaatcgggagcggcgataccgtaaagcacgaggaagcggtcagcccattcgccgccaagctcttcagcaatatcacgggtagccaacgctatgtcctgatagcggtccgccacacccagccggccacagtcgatgaatccagaaaagcggccattttccaccatgatattcggcaagcaggcatcgccatgggtcacgacgagatcctcgccgtcgggcatgcgcgccttgagcctggcgaacagttcggctggcgcgagcccctgatgctcttcgtccagatcatcctgatcgacaagaccggcttccatccgagtacgtgctcgctcgatgcgatgtttcgcttggtggtcgaatgggcaggtagccggatcaagcgtatgcagccgccgcattgcatcagccatgatggatactttctcggcaggagcaaggtgagatgacaggagatcctgccccggcacttcgcccaatagcagccagtcccttcccgcttcagtgacaacgtcgagcacagctgcgcaaggaacgcccgtcgtggccagccacgatagccgcgctgcctcgtcctgcagttcattcagggcaccggacaggtcggtcttgacaaaaagaaccgggcgcccctgcgctgacagccggaacacggcggcatcagagcagccgattgtctgttgtgcccagtcatagccgaatagcctctccacccaagcggccggagaacctgcgtgcaatccatcttgttcaatcatgcgaaacgatcctcatcctgtctcttgatcagatcttgatcccctgcgccatcagatccttggcggcaagaaagccatccagtttactttgcagggcttcccaaccttaccagagggcgccccagctggcaattccggttcgcttgctgtccataaaaccgcccagtctagctatcgccatgtaagcccactgcaagctacctgctttctctttgcgcttgcgttttcccttgtccagatagcccagtagctgacattcatccggggtcagcaccgtcggaaaagtggccatcatttgacgaactacagcccgggttcagcacactgagacttgtaaaaaaaaaccccgcgcggggttttttttttaaaagcaccgactcggtgccactttttcaagttgataacggactagccttattttaacttgctatttctagctctaaaactaacacgccacatcttgcgagaatctattatacagaaaaattttcctgaaagcaaataaattttttatgagacagtcattcatctttctgcccctccaaaagcaaaaacccgccgaagcgggtttttacgtaaatcaggtgaaactgaccgacctgttaccaatgcttaatcagtgcacgaagttcctatactttctagagaataggaacttcggaataggaacttcggctgaaagcgctatttcttccagaattgccatgattttttccccacgggaggcgtcactggctcccgtgttgtcggcagctttgattcgataagcagcatcgcctgtttcaggctgtctatgtgtgactgttgagctgtaacaagttgtctcaggtgttcaatttcatgttctagttgctttgttttactggtttcacctgttctattaggtgttacatgctgttcatctgttacattgtcgatctgttcatggtgaacagctttaaatgcaccaaaaactcgtaaaagctctgatgtatctatcttttttacaccgttttcatctgtgcatatggacagttttccctttgatatgtaacggtgaacagttgttctacttttgtttgttagtcttgatgcttcactgatagatacaagagccataagaacctcagatccttccgtatttagccagtatgttctctagtgtggttcgttgtttttgcgtgagccatgagaacgaaccattgagatcatacttactttgcatgtcactcaaaaattttgcctcaaaactggtgagctgaatttttgcagttaaagcatcgtgtagtgtttttcttagtccgttatgtaggtaggaatctgatgtaatggttgttggtattttgtcaccattcatttttatctggttgttctcaagttcggttacgagatccatttgtctatctagttcaacttggaaaatcaacgtatcagtcgggcggcctcgcttatcaaccaccaatttcatattgctgtaagtgtttaaatctttacttattggtttcaaaacccattggttaagccttttaaactcatggtagttattttcaagcattaacatgaacttaaattcatcaaggctaatctctatatttgccttgtgagttttcttttgtgttagttcttttaataaccactcataaatcctcatagagtatttgttttcaaaagacttaacatgttccagattatattttatgaatttttttaactggaaaagataaggcaatatctcttcactaaaaactaattctaatttttcgcttgagaacttggcatagtttgtccactggaaaatctcaaagcctttaaccaaaggattcctgatttccacagttctcgtcatcagctctctggttgctttagctaatacaccataagcattttccctactgatgttcatcatctgaacgtattggttataagtgaacgataccgtccgttctttccttgtagggttttcaatcgtggggttgagtagtgccacacagcataaaattagcttggtttcatgctccgttaagtcatagcgactaatcgctagttcatttgctttgaaaacaactaattcagacatacatctcaattggtctaggtgattttaatcactataccaattgagatgggctagtcaatgataattactagtccttttcctttgagttgtgggtatctgtaaattctgctagacctttgctggaaaacttgtaaattctgctagaccctctgtaaattccgctagacctttgtgtgttttttttgtttatattcaagtggttataatttatagaataaagaaagaataaaaaaagataaaaagaatagatcccagccctgtgtataactcactactttagtcagttccgcagtattacaaaaggatgtcgcaaacgctgtttgctcctctacaaaacagaccttaaaaccctaaaggcttaagtagcaccctcgcaagctcgggcaaatcgctgaatattccttttgtctccgaccatcaggcacctgagtcgctgtctttttcgtgacattcagttcgctgcgctcacggctctggcagtgaatgggggtaaatggcactacaggcgccttttatggattcatgcaaggaaactacccataatacaagaaaagcccgtcacgggcttctcagggcgttttatggcgggtctgctatgtggtgctatctgactttttgctgttcagcagttcctgccctctgattttccagtctgaccacttcggattatcccgtgacaggtcattcagactggctaatgcacccagtaaggcagcggtatcatcaacaggcttacccgtcttactgtcggcccggatgatcctgacgacggagaccgccgtcgtcgacaagccggccgactaggtcgacgcttggattctcaccaataaaaaacgcccggcggcaaccgagcgttctgaacaaatccagatggagttctgaggtcattactggatctatcaacaggagtccaagcgagctcaaaaattaaaaatgaagttttggaggcctcatttggtgacgaaataactaagcacttgtctcctgtttactcccctgagcttgaggggtcaacatgaaggtcattgatagcaggataataatacagtaaaacgctaaaccaataatccaaatccagccatcccaaattggtagtgaatgattataaataacagtaaacagtaatgggccaataacaccggttgcattggtaaggctcaccaataatccctgtaaagcaccttgctcatgactctttgtttggatagacatcactccctgtaatgcaggtaaagcgatcccaccaccagccaataaaattaaaacagggaaatctaaccaaccttcagatataaacgctaaaaaggcaaatgcactactatctgcaataaattcgagcagtactgccgttttttcgccccatttagtggctattcttcctgccacaaaggcttggaatactgagtgtaaaagaccaagacccgctaatgaaaagccaaccatcatgctattccatccaaaacgattttcggtaaatagcacccacaccgttgcgggaatttggcctatcaattgcgctgaaaaataaataatcaacaaaatgggcatcgttttaaataaagtgatgtacaccgaatttgattgcgtctcaacccctacttcggtatctgtattatcacgtgtatttttggtttcacggaaccaaaacataaccacaaggaaagtgacaatatttagcaacgcagcgataaaaaagggactatgcggtgaaatctctcctgcaaaaccaccaataataggccccgctattaaaccaagcccaaaacttgcccctaaccaaccgaaccacttcacgcgttgagaagctgaggtggtatcggcaatgaccgatgccgcgacagccccagtagctcctgtgatccctgaaagcaaacggcctaaatacagcatccaaagcgcacttgaaaaagccagcaataagtaatccagcgatgcgcctattaatgacaacaacagcactgggcgccgaccaaatcggtcagacatttttccaagccaaggagcaaagataacctgcattaacgcataaagtgcaagcaatacgccaaagtggttagcgatatcttccgaagcaataaattcacgtaataacgttggcaagactggcatgataaggccaatccccatggcatcgagtaacgtaattaccaatgcgatctttgtcgaactattcatttcacttttctctatcactgatagggagtgggaaaataactctatcaatgatagggtgtcaaatcgatgcacaacgtgcgttacatatcaaagggaaaactgtccatacccatggataacgggcgtataacacgcccgttgttttatgatgatgtaaaatcttccccaaaactttccccaaaacccttccccaaaactggctatgaagttcctatactttctagagaataggaacttcggaataggaacttcttttgcggccgcaagatccgctcatctgtaacatcattggcaacgctacctttgccatgtttcagaaacaactctggcgcatcgggcttcccatacaatcgatagattgtcgcacctgattgcccgacattatcgcgagcccatttatacccatataaatcagcatccaggttggaatttaatcgctgcctcgagcaagacgtttcccgttgaatatggctcataacaccccttgtattactgtttatgtaagcagacagttttattgttcatgatgatatatttttatcttgtgcaatgtaacatcagagattttgagacacaacgtggttcccgccatatgaaaatccggccagaccaacatcattctggcgctccgaaagaagggatattcgccgccgtgaccagcctggagcgggtcgcataatctttggccgcttcgtagtcgaggaacatggcatgaaccacggcagcctggcggctgcaaattgaaaaccgccccggttcgtcctgttgttgccgcacgccccgcagaatatgtatgctctgaggacctgttttattaaggactcatccccttatgttgacccgcaaaagtatcgatacagttctgctctctgttggtgctgagaagctctcacaacgagaatgggactggatgaaaatgctcaaacccatggacccaccacctgcgatggtgacgacctccatcctgaagcgccgtggcgatacagcagcccttaccctgctacaggataccggggtttaatccatcctcatgttgtccggttttactccccgccctctgaaacgtctgttcacagccaaccagtgctggacgtccttcctggatgcgggcggtctgcgcgatatcgaggttgaagccgtcaccaaaatgctggcctgcggcacacggatactgggtgtaaaagagttcgggtgtgataacccggactgtcagcacgtaaagtacctgaccaactcatgcggcagccgtgcctgcccgtcctgcggaaagaaggccacagacctgtggacagcaacacagctgaatcgtcttcctgactgcgactgggtacatctggtcttcaccctgccggacacgctgtggccggtgttcgaaagcaaccgctggctgctgaatgacgtgtgccgtctggcggtggagaatctgctgtatgccgcccgaaaacgggggctggaacccggtatcttctgcgccatccacacgtatggccgtcgtctcaactggcatccgcatgtacatgtgtctgtaacctgtggaggtctgaataagcatggtcagtggaaaaagctgagcttcctgaaagacgcgatgcgttcacggtggatgtggaatatgcggcagctgcttctgaaagcgtggtcagaggggatggcaatgccggagtcgttgtcacatatcacgacggaatcacagtggagaagcctggtgctgaaatccggcggaaaatactggcatgtgtacatgtcgaagaagacagccggagggcggaatacggcacgctacctgggtcgttatctgaagaagccaccaatagcggcttcccgactggctcattacaacggaggggcaagcctgagcttccgttacctggaccacaaaacgggagaaacggcgacggaaacgctgacacagcgtgagctggtcgcgaggctgaaacagcacatcccggagaagttttttaagatggtgaggtacttcgggttccttgccaaccgtgtgtgtggagagaagctgccgcaggtgtaccgtgcactggggatggataaaccggaaccagtggcgaaagtgtgctatgcacaaatggtgaaacagttcctgagtcgtgacccgttcgaatgcgtgctgtgtggctgccggatggtataccgccgggccattgcggggctgaatgtatcagggctgaagaaaaacgcgcgggatatcagtctactgaggtatatgccggcctgacacaggctaagtgtgcccgggaatcggtgaaagtataaaaaacagcctgttacggtataaaaatcgaccatacagagagggaaaccaccggagtggtgggaaaagcagaaaggctcacgtggcataaggcgtggacaatggtatcgactggtttttcaatttcctatacgtcaagatacaaaccaccttttcgccatgaggcagaaagcctcaagcgccaacagcattatatattgaccaggaattaaattcccagctttcggcgtggactatacagtgtgtgattcaccacgatgaatcctttgttgatccactgtgtgacctgcgcaggttgaactccggtcagcctggcgaacgatgcctgattcccccgatagaacttgttgatgtattcaatcaaaggcattttttaattctccgaaacaacgcaaaatcatatagtaatttactatatgatttttattccgcaagtgattaactcatcggatttctttgtagttaacgaaacgttaaatttagtttgtgcctggaatggcacgcaagaagcacactagcattatcattttgatcaaaacgctatttccccccgttattggggggctttctttttgatgccgcgccagcggcatgtaaggcggcactctgttgttttatatggcacagagctaaaccgccgaagcccggcgtaagccggtactgattgataggtttcaccttacccatccccatcctgctaagccatacccgctttcagccatgaaatagcttttgtgcgcggtcggagtggtcccgacaagggtttacccgcagtcggggcgtatctccgcgttagcggaccgtcagggccgcttacgagcgtgtatttggtacttccagccagaaggctgacagcgatgagatttcttagttacaacatccattattgaaagcgatgttgttcccgccctttgggcgggggcggcggcgcttttcagtgatgggttgggcactgtggctgagtatttgcagcgtttttttgtaggagggttggaggggctttgtttttcattaggcagaagtccatatgcccgccgcgaagcggtgggaggtacttttatattctgagcggcgcggcgttagccgctgcaagcgaaggcatttttgtgattatccacagttgtttcaaagataaatattttccctgcggcgaagcaacgcaggggattaaagaacaggggttaagaatatattgcgggtttgatgttctatgtttgctgctttctgaagttattcctttgcgggtttttgtggataaccgaaggcgtttttactccgataccctattgcggccatcaaaaaactgtcagagcgggacaaaatgaaaaacggtcgtcaaatatgaggaatttcatgaaatgcaggcaacacgaaaagccccgaaggggctgaagagagtgccgattgtatcaggcagctaaactagtggggtggcgaagctgtcagagccagttcaagctgacgtagatctctggctaccagttgctctaatctttctttagtgcaccagtacgcttcgtccggcggcatacgcttcagaataaaccgcgcaatttcgtttcgctgttcatcatacggcagttttgccaggcgattagcacgtttgcgctccgctgctttcttacgtcgggacttgatggcatcgagagaacgctgcgcataccagcgtttacgagccgagtgaacagagatttcttcgccctcgcggataacgccttctttaatcaattgcagacggatttcactttctgcaaggcgcttacgttgctgctcctgaagtttcaccagatcaactcccagcattttccagccagtttcggtgatccagacgtatttcggcagtcgctggcgggattcacgatcccatatcgtcttttctgacgttcccaacgtgccaaaggaaacctgctctgccagcagacgggaaaggcgcgatactgtgactgcggtttcaggaatcacgtctcccttactgtcttttgggcttatttcttctgccaggcgggagacagacatgccgacagtgtgcaatccacgatcacaaaaactcacaagtacaacccatattgcgtcaagcagccgctgtttctccggtcggaatttatatttgcgaccgacactctgacgtttcagtacataaaatggatgcaacgacatgtgcattctgagtgtgttctgaccagtgaccgggtcttttttaacgagacgattgtaagcgtggcccaactgtccgcccagcgccttatagttgtcgggacggaaccaggctggattctcacactttggcttagtggaatgttcaccccggcgacgttttgttgttccgcctttgttttcctgggggaccaggaatgagctttcaattcccgcttcgtagtcctgccagaaacggatctgctcttccggtgatagttcagaccagtgacgtttgctaatcacagcaagctgcacttagcttgcactgtaagagttgatatttccttctcatggaattaaactccacttcaggtaacaagcatacctgaaataaataagctcaaggctctgccttgatgtcagcccccgctaatcttcgctgcctggaaaacacgagattacgggggttttctttatctgaaatttacgttcttgaacaaaatttcagcacctcgttttctgcatttacaaatcgcggaaaacttgcctgcaaatttagcagcatgggcgcaatcgatcaacgatgttcaagcctggctcgtttcctttttgattcagcacacatctctgacagcttcaaaatcgttttcagaacagctactgaagccccttctttactgacgttccccatacaaaaccttacaaaatcagaaattcagaattttgtatattcaaaaaagtttttttgactgcatacacccactcacacgatcgaataaaccacacaaacagtattatctagatttttagatcgtacatcatttaacaaacagaatattattctgctttttagatgttatctagatcattagatcgctcacgcggcattgacaggttttaaatgtcgcacacacaatactatccagatgattgtaaaaagctcgttcatcgcgttttttgtgctcattgcctggaaaatgagcactctttgacgcccgttagaacgcttgtcatctcatgctctttaacaaccccggacagcggtcattgcctaaagccctggcataaggaggttattattcgtgcatttcaagcaccgctggcatctgtcagcaacgggctacgtaacagagtgacgtgccgcgccatctacacaggtaacgactctttatccgcaaatatcattctgcatacttaaacccccttatttggtgaactcgcgttgagttaatctcactcactctctccctgagcaagtcgtacaggctgcaacgcagaagtacaccagatttgccagtctccactccaggtaagggggtttagctatgcatgatgatgaacaatcagataaagagcctgtagtgagtggctgcaacttttcataattagcttatgacgctgtattccggggatgtttctatttcagacaaacaaccgggagaaaatatggcgcgtaagttaaaaattaatcctgtcattcctgaatgtgtggcagatttgaaaggatatccactctatatcatcgttgcttattggggattaagaaataataaaacgctcacaacaacggatgttagccgtaatttccttattacacagcaacaatcttatgatgtgcttacctacatttaccaggaagcacagaagcagataacagcaactaaacgaacactatttaacgagcacaaaagaagaattagtgcgttcaggattcttgatattgacaaaggcatattgcgcaccccaaaaaaagagattgcatatgccagctacgacaatataccaactgtaacaatgaaaagtacccgttgtgagatccaagatagttttacagaactgcgccgctggatgtgttcaagaaagacaggtgatcgagtggaggtatttttgaatgtctaagtaccaaataaacgcaaccatcaaaaaaccaggtggtggccccgtgaaatggactcattacagcgacttccctatgaccgctgaagaatgcagaaaaaacttctcaaaagaaaaagaagcaggaaagtgtttttctgttgatgttcatatttcagatttcatttgcaaagaaatacatccactgtgatgaatggggagaggattaatcatgattgacgctataattacgccaatagttacatctattccgttactcttattaattttagttgcgctgatattcgttaaatctgccgtcaaaatcgtgccacaaggtaatgcctggacagtggaacgctttggtaaatatacccatacgctttcccccggtcttcacttcctgatcccggttatggaccgcataggtcaacggatcaacatgatggaaaccgtcctggatattcctaaacaggaagttatttcgaaagacaatgcaaacgtaactatcgatgctgtttgttttgtccaggtcattgatgcagcgaaggcagcttatgaagtcgataatcttgcatcagctatttcaaatcttgttatgaccaatatccgaactgtcgttggtggaatgaatctcgacgatatgctttctcaacgtgacagcatcaattctaaactgttaacggttgtcgattatgcgactgacccgtggggaattaaggtcacacgtattgaaattcgggatgttaaaccaccaaaagaactgactgaagcgatgaacgcgcaaatgaaagcggaacgaactaagcgtgcccggattcttgaagcggaaggtatccgccagtcagaaattctgaaggcagaaggggaaaaacagtctcaaatactgaaagcggaaggggaacggcaatcagcatttcttcagtccgaagcacgcgaacgtcaggcagaagcggaagctcgcgcaacaaaactggtgtcggatgcaatcgctgaaggtgatgttcagtctgttaattactttattgcgcagaaatacactgaagcactccaggcaattggcacagcatcaaacagtaaactggtgatgatgccgcttgattcaagtagcctggtgagttcggttgcaggtatcagtgaactgctaaaaaacgtatcacaggatactcccaaagttgatatgaaacaggctcaacaatatttgtcttaaaacagatagcggacggtgacaatattgttttaatcaccgtccttatattcatattcacgaatgagcaaatcattaaaatgaaaacttatgggttcatccttcttattttacatataatccctatgggggcatggttctttcttctttttattacaaacgatgagaacaaagtagaaaaaatacaaaaccacatcgtatcaatatttccattatggctgaactggggaggggtgatgatagcgatggctctactgcccctgttaatatggagttttaatggcatattcttcggcttctttctgctaatttatgcatttggcgtttataactaccttcatcttctttattcaatttctcccttttatcatggagattagccatgttatggtatacactatttcttctgtgtattgcacttgaacttataaccggaacaggatggttactcttaatcagtcttggtgcattatcaagcgccattgtgggcttttttcttccgatatcacaagaagccaatatatgcttctttgcgtcaatcagcatactggcgtcgataattaagttcttctatgacaaaaaacataagaaattagacactctcctggtgaacccagggcattcacgttttaaaggaaaagaatttacgctcagtgacgatattgttaacggcaaggggcaattactcattggtgatacattctggcctgttgagacgttacacaatgaaaactaccttgcgggaacaagagttattgttacagacatgcaaggaataactcttaaagtaatgaccatcgaagacaagagtgaaaacaaggaataaatcatgcatctttcgttgttaattccgcttacaggagcagcgatgaatgcactatgtatttttattatcagacttctggataaggattttattgaagtctacaaaaaaacgctaaaaaaaattactgcattacatattttattgatggtgttaagtgtcacaggaatagtatgaggacaattctatgcgaaacgcaaatgaaggaatttctcttgcagctattgtagctaaagaaacaacaacaggtaaatggaatggtactggtgggggtattggtttaggtactggtggtattggcttattcatcggaggtgtttctggttctaaacaagagcagacacaaagggcaaaaaactttgaatcgcctaaagaggaagaatacagtctattaaatgtatacggttcgataataaaagttctcgttttcggcgtgctatttggtttatctgcccgtttatttacatctttatcaaacactggttctgattttgctgaaccagtaacaaccaccacagccacaggaaagattcaatctattatgggtggcatggcagaaatggtaagcattttaggcaccgttgtcccttttttagtaattatcacagcaatgatctggtttctgtttttcagcagcaaacgagaaaaagaagagttaactcgagttgaacgtgaagctgctaaaacaaaactccgtatagatgtctatcaccgtttacgttacgttgaaagcgatcatgtcgtttttgacccgattacaggccgggaggttccggcagaacggacgtgtattaataaactgattgaggcacttgttgatgaaagcaacgacatctcaaaaagaaattgacgaacttctgaatgcaataaaaacaggacattcaaaattcattctatcaatacccgtacatactacccatccaatggcccataaaataatgaagccttacttcaggagaacaggaccgcttctgtattcagatagtatattcaggatttgaagaaagcatttatttatatagggcatacaaaaatgagtgcttttattaagctggcatctgttctggcgttatttattagcccggttgtggttgcaatagcaggagaacaatctcactgtacaaaaatcaacgaataccctttcatcgtcactcaatgcgacgacggaactgtgacagtggtaaatgtgataaataaccgtgtagctgtgtgccgtaaaggggaatcatgcaaagaaataaa

SEQ ID NO: 169 - DNA, 74649 bp, Artificial Sequence
  plasmid TP114tetB-Kill3
attataactctggacacattacatgactcaagcaaaagctaatctgagaaaacttcgccgtgcacgttatgtcccccctcgaacagtaaagaaaagcatagcgaatacagaacgtgtcgtttcaaaagcaattaccggctgtggtgtcttccgtgatataccacaagtaaaaatcaatctcatcgaaacaaggaaaattttacaaatcgaactggctttatccattgctaacttatctgaggcgaatccaattgagatacgaaaaaaaatcaaaagcattgaccgacaattatcttcaacctcaaaaatcagaactacattatgaaaaaaaacgacgatttaatcactttaccacctcataacagccacgctctcgattacatcattaaaaaagcgtttacaccacgtaaaaccaaaacatcgacagcgacccacaacgtttatagttacaataaagaagaatccacattaaatttccaaaaaattggagaagcaatttttttcggcacagacctggtaattaagctgaagccaaatattagtgcctctggtgaactcttcatctgccagaaggactaagctatgaacattgtttcagaatttcttgagaaagtaacaaccattgttgaatccacagcggcgacgaacgccgctaaggtcgcacaggcaatatctcctacattttttgcggctatagccttatacgttatttatctaatatatgaaatcacgtatgcccaacgtgacatccttatgaacgaggtgacgaagaatatcggtgcattcgccctggttggtgcattcacttattcagcgccttattacagccagtttgttattccttttgtaatgcacgctggctccgacctttctgctgctgttactggaggttcaggaactgcaaccagtgttgataatttgtggaacgctctatctacgaatttaaacaacttccttgatacaagtatgagtatttatggaaagttccaaattgctgagaaaatgggggtttatctagtatgggggattggctatatcggcggaatgcttctcatctattacactactgttttcttgacactatcaactttcatggttggaattcttctttccgctggcattttattcatttgtttcgctctattttcatcgaccagaaatatgtttactgcatgggtcggcagttgtctcaactatatactgttaaatttattctatagcatatcatttagtttcttaattagtttcgttgaatcagttgtccctgttaatggagatataaaactatctattgtagtttactttttccttattactattatttccatattccttatagaacaagttggcacactctgttctacattaacaggtggggtaggtataaatggccttacatcagccgctaatggctttggaggtaaggttgcatctggttttatgcgagcatcaggactccgatctttcaccaatggatttgccagcaaaatgccaaatccattctttaatgcaggaagtcgttctgcatcagcattagttcagggattaaaccgtggaagtaaacttaaagcggggtgattaacatgaaagataaagtattatcatttctctttgctggaataattaccgtaacatcaccatcaatctttgcatctggtattccagtagtagacgttacagcgatagctaaaacagttgaagaagggctaaatcgtgccgctgaagcggcaagacagcttgagcaactcaagcaacaatatgaacagaccataagatacgctgaagaacagaagaaaagactcgaaggcttcactgatttcagcaatggctttgatagcgcatccagctatatgaaggattctctatcaacaataacaaatagtgcaaaatcagatcttagctctttgcgatcgcaatatgacttatcaagcaacattgcagagacgcaacaaaaatatgatgcaatcctggctaagatcaaattctatgaaaatttcaacaatgaaatgcaggaaagggctaagagattaaccacgttacagaaggagttcgcgtcagcagatactccgcaaaaaaaagctgacttatctaaccaattgaatacagaaaaattgacaatggagctacaattgaagcaatatgatattgcagagagacagctaatcgcgtctgaaaatgcaagacaagaggctgttagtcgagaaaagtttaaattaatgatgcaataggtgttcgaatgaaaaaattcataagcactttaactatcttgtcatgcttccttttagctgcttgtgaagacaaagtttatgatgtcagttactacactgaacatcttgaacaagcccaagatgttgtcgaaaaatgcagcaaaggggatatgtctggtcaaaactgcgaaaatgcgcgtgaagccattcaaaaagagcaatcgggtaaagcatttaaaaatatgatgcaataatccttcattaaaaacagctcgcaaagcgggctttttttggctgtacgcagtgaccagttgataaatagttctaatgttcgtgctgcattagaacaacgcacaaaaagaagagtacaagaagacagtgcgggatctaatggaacgtttacaatagaatcaccttccctatagcaaggtgattctatttaaaagaatacccgcctcgtgcgggtcttatcttgcttaaagatctatgaaacctccggcttcgggtattaaactataacttgctttggcaaatattgtttcattgacttcatggaatcttattttctccgcctgttcatatgttacagggaagaacacgccccctggctcattaaacatcataaaatcaccttgcattgcgttacaatgacaacaatgattcgcgtaatacttcatttttgctgttttgctatgggatggataatataattttgaatactcattaatccttgagagagcagaggttgaaattatttcaattttcgttaaatcagtccaccatactctactggttaaccaccgataaatcatatttttctttgaatcaaaatactccatacccttaggggaggatgtttcataccattcatctaatatacaatcttcccattcggcaggatcaactccccaaataacgtctctatacttataccaacgaggcaaaaaaacaccaaacacaggagttattttcttacagcgccaacatgactggtaactttccgcaatataaaaacgttgagaaaaaatattgtaatcatgttcgtttaattcttttacccactgaataaaataaattggatttttcccctgtggaacaaaccatttccgttgttcttgatcccattgcgcccctttttgtttggctaactccttttcttcaaaaggtacatttaaataaaaccgcgccataaccaacttaactccagtattctgttctgatgatgcaacaggatagatatcaaaactaaacaaagagtgcaattccgcctttaatggctcattcgtacccgcctcgtgcgggttttcttttgcctgaaatatggaggaactccatgaaatccatcattttatcgatggttgccgccaccgcattactgtcaggctgcgcggatagcaaaacacaaccagtacctgagtcaccgttaaccaaacatgaccatcagatcacgttgaaaattgataccgtgcgaacagacctgccggacagttctcctgtttgtttgaatggtatgaatatatacgaaagtctgagcgagcggcatccaggcttgtttgccaaaaatcagaacgtgattttccgtagtgcattctttgatgacggtcaggcgatatcctccgaaacaatccgcaaaataatgcagagtaccccgtgcgttgaatcacaaacaacatctgccggaagctgggaacctgccacggaactgctcccccgtcaggcaatatccggtgacactacactggctgaaaaagatcggactgctggcttcacaatgcggatagcaccggagattgagcgtggaaatttccacctgctactcacaaccactgacccgatacggaaacagactgtcgagcagaatattttactcaaaccggaccagccccttatcgtgagtggttttactggagttaatgctgatagccaaagtgagaaccggattgtcatcattacgccacacgtgcgttgattcccctgatatttaaattacccgcctcgtgcgggttttcttttgtctgaaatatggaggaacaccatgaaatccatcattttatcgatggttgccgcaagtgctatcgcactctctgcccccgtatatgcgtctgatccgtgtgcttccgttctttgtctgtacggtaaagctatcggtagcggcggcgggagcgaatgcaaaagcgccgaaaaggacttctttaatatcataaaaaagaaaaagggatctattcgctggagcaaaacctttgatgcccgaaaagcgtttcttaatcaatgcacgaccgcagaccctgcggcgatctcaaaaatcatgagtaagttcggacgttcctggggttaaccatgaaaaagctcattattattcccaccacattattgctgaatgcgtgttcccatgcccctgaacccgcacaggcaaaaggaggttggtatgaactgaataccacaattgagcaggtaagagcagacacatactataacggggtgatccttcagcagcccgtgtcacagccaaacagcactgttcaatacagcaatgataattatctcaaaaaggaaaccataaacgtaactcccgcgcctcgtattgcagaaaccgtaaaaccacgttctgagcaatcagcgacagcgccaaaaaaccagggcagcaataatagttttctgaagccgacaacaaacagcataacttcatctggtgagataaaaacagcagccaaaggagcaactaaacagcattctgaacaaccagcactctctcccgcaaagccaatcagtagcaacaaccatcaggcacaaacggcacaaaagactgatcagcagacaaaaccgcgtcctgaacaaccaccgctaatgtcaaaaagcggttttctgaaaaaaaacgctaacaacgctgttccggccaccacgcttacaggcccatcaacacctgaaaagcaaatttactttgttcgccatgatggtaaaggctcgctgcaaaaagcattaaaagaaattgtcccatcggactggacggctgaaatatccccggaggtaacgaaaactttccgtcgcacgatatcctggcagggcaacgatcaatggccttatgtcctggataaaatgcttcgcaactacggtctgacggtaattaagaacaccgaaaaaagacatcttctgattgattttcaacaacagaaagggaaaacatcacaaaaagcacctgtatctcctgacaaaacccctgcatctcctgtcaggacaccagtttcctctgacaagttacctcaaaaaccgctaacgcctgtcaccgttccgcaaaaacagacagaaaaactcacctggaatcttaaaaaaggttcgacgctgcgggatggcctcaccgaatgggcgtcaagttcaccgtgtggtaattcaacctggaatcttgtatgggatactcctgtgaactacagaatagatgctcctcttattttccggggaaactttgaatctgcattaaaagatacgctgatgctttatctttcagcagataaaccgttatacgcattcaggaatattgcacaatgcgtaatcacaattaaagacacacaacaggagtaatcgctatgggttggttcttcagcttgctcctgatattcctgtcaataggcagttactatctgacagataacaataaccaaaccatacagcgaatgaagttgcttcctgcaaaacaggaagcaattgaatttgtccatttcgcaaatgttatcaatgactatctttataaatatccagacaaacgtaattcaggaggaacgttaacatctgagcaaatcggtataacacccgtttatgatattcatcatattatttacggtaagcgagtttatatctggtctgccgatacagaaggtctgatgtctgctttgcagcagcaaacaaaacattcagcaatgttaggaagagtaaaaaataagaagattgtcgataatcaggggaatgatatgggcgttcccgttccttcctccattccagaagaggctattgtactcattaactaaatatcccctgacaaggggattctgaactggagtctgcatatccgacacatcattatgtgggccggatatatcgctacggcgcggacttcagtccagaaaatctttaccggagatacccatgcaggataatgatgatgtcagcgagcttgatattgccactcgtgaagtccttatcttacgatgcaatcttattcagcttgcttctgaatatataaaaataaatcctcttaaaaacacccgaatctacacagatttaattcatcgttcagcagatgttatcaaaaatatcgaacaaggtaacatccagaataaacataattatctgtcacaggatgtaaaacatacgcttgttttatacgacctgtacaaatcagactttgaacaatgtccgggggcaaaatcccttatacctgtcagggaaaaaattgtctcgctgaaagaacttctttccggcgctaatgagctggacagtatcgttcgtcgcccccgcaggaaaaaacgttcttcacgaatttaatatcaggagataaatcccttatgcagttatcagcggctgttctggcagcactgataagtcagtgtgcccctgatgtatcacccgatacgatgaatgccctgattatgactgaatcaggggctaatccatatgtaatagcgaatgtttctgacggaacaagtaagtattttaaagatgaaaaaggagctattgaatatgcagaaaaattaacagcagaaaataaaaggtttagtgcaggtctgacacagatatacagcaaaaatttcccatcactcaatctgactaataaaacagtttttgacccgtgtacaaatataaaagcaggagcggcagtcctgacggacaattatctgagacaaaaggagggtagtagtaatcaaaaaattctccgcgctttatctttgtattattcgggtaacgaatcaacaggatttattaaagaaaagaaatttaacaacacttcttatctggaacgggttattcgtaacgcgaataactatatcgtgccatcaatccgtgaaaaaactgatgaatcagaaataaaacccccgaatgatgaagagaaaacatcaccggactgggatgtttttggagattttagttaatgaaagtcaaatcaactttgcagtattttatcctggcgtttttcctgtcactaactgcctccgttgcctatgcaggtggactcgataccgcaacaaataccatgacagaacttaagacatgggcatttagctttggtggtgtttgtgctttgtgttacctgatctataacgtcatcatggcattcatggagaagaaaagctggtctgatgtaggaatggcgcttgtctattgttccctcgctggcggtgcactttacgccgggaactgggcgctggaactcttcaaataagtaatccatatatacaactgtgccgcatatttaccttatgtgtgaattgcggcttttttcatggtgagttatggacaaagtaaatgaacatgtcagtgagtcattcatgacttataacgggtttaaccgtcctgcgttaattgctggtatacccttaatgttgttattgttcacggcttttttcgctgttctgacaggcttccccgctattttcctttggggtataaaagggataattattcctgtcatatgtgcgctgtttctttttatagtaaaactggcctgtgaaaatgactcaaacgcactaagagtcatccgtttaaaccttatggggcttttgttaaaaatccgccacagagatttaattattggttattcatctgtcaggtaacatatatgcacaaaatcaaattaaaaaacagtgacaatatggatgttgctcgtgaatatcccgattatcgcttccatataacagacagtattatctttacttctgacaggaaaatgctggcttcacttgttgtagcaggcattccatttgagacagagaacgataatgttcttacaaatttatttaacagcgttaaaaacttcctgattgggttaggaaaggaaggcgacctgtatttatggactcatcttatcaagaaaagagcaaccatcaatggagaatggaattttgacaatgattttttaagcaggttttcaaaaaaataccttgctctgttcacatccagcgcattctataaatcaacatggtatctgacatttgggattccctacgatgatgttgataccggaatcgagcgcatgaatgaaatgacacaacaggcgcaaaaagcacttctaccatttaacgcttctttattatccgtttacaatacttatattagtgaggtggcagactatctatcactattgctaaatgcagaacataacatgattcctttatcatccacccccttatcatccagtatttgtgattctgaatggtattttggtgctgatgttcttgaactgcgtaacaacgaatcggatagtaaaaaattcgcaacgaattatattttgaaggatttcccgatagaaacaacccccggacaatgggatttccttctcaaacaaccctatgaatttattcttactcaatcctttatttttgagtcaccaacaaaaaccctgaagaatatcgattcacagttaaacaaactacaatcagctaatgatgcagccaaaatacagcaggaagaactcgaagctggtaaagaagcggtcgcagccggaattacgttgtttggttcactacactgcgcattaacggtattcggtgatacaccagatcaggccagaagcaatggtataaagctctctgctgagtttattacttcgggtaagggattccgcttcagtcgcgcctcactcgcatcaccttttgtttttttcagtcatatgccgctgaataagaggcgtccactggatacccgaagaacaattaccaacctggcctgtctgatgtcttttcacaattattcctccgggaaaaaatcaggcaatcctattggtgatggctccgccataatgcctttaaaaacggattcaggcagcgtttactggttcaatacacattacagcccaccggaaaaaaatgttaccggacaaaaaattgccggacacgcaatgtttcttggcgcaacaggcacagggaaaacaacatttgaagcaacagccagcggctttcttcaacgctttgaccctttaatgtttgttgtggattacaaccgttctaccgaactttttgtccgcgcatacggagggagctatttcacattgcaggaaggtatctataccggctgcaatccgtggcaactggcagaaggcccggaatcgcccgtctggcacagacttctcgcatttctgaaacgctggacacaggttctggcacgagacaaccagggcaacccctgttctgatgaacatggcattgaattaaacgctgccgtggaaagcattatgcgaatgcctgtcgaagaacgccggacagcccttcttctcgatatagtcagtcctgaacttcagacgcgtctcgccaaatggtgcgacaacggcgaatatgcctgggcggtggattccccccggaataccttcaatccactgcatcataaaaaagtgggatttgatacaaccgttgtcctggacacaaaaaacggtattcatcctgcctgtgaacctttactcgcggtcctgtttttctacaaagaaatcatgcaacgcggcggcaatctgatgctctccattattgaagagttctggatgccagcaaactttcccatgacacaaagcatgattaaaagcgcactgaaagcggggcgcatgaaaggtgaaatgatgtggttaacatcacagtccccggaagacgccataaactgcgcaatttttgcggcgctggtacaacaaaccgcaacgaaaattctcctgcccaatcccgatgcaaaatgggaaggatataaagaaattgggcttactgaaaaagagtttgaaaaactcaaagagctgacgaaggagtcaaggaccatgctcatcaagcaatctggctcttctgttttcgccaaaatggatttgtttggattcgatgagtttatccccgtgctttctggctctgaaactggcctgtctatttttgatgagattattgctgaaaaaggagatgtagctcctgatatctggataccagaactcctgaaacgcctgaacggttaatttctctgttttatacagaacggaaaacaatatgaaaatccccctcataattgcctccgcgctattaattagtgcatgttctcacacccccaatcctgtgcagaaaaaagggggatggtttgagttaaacacagcaattgaacagatcaaagcaggtgattattaatggaaaacacaaactattatgaacattcaaaaaaagaagccaccaaaaagaaatttgaagaaaaaaacgaaaaaaaggattatttcaaggccatacgtgactttgagcgcagtgaaattgaaatcataaagaaaaaggcaaaaacatttaccattctcgccattggtgaatttgttgtaatttgcattcttggtttcgcaatagcctcccttgctccattaaaaaccgctgtaccgttccttgtgcgagtggataacagcactggatatactgatattgcccctcaattatctgatgctaaggaaagttatcaggatgttgagactaaatatttcctgtcaaaatatctcattaactatgaagcatacgactggcagaccatccaggaacaggccgatacagtaaaaacaatgtcttcccaaaaggtgttttcagcttatgacaccatgattcgtgctgattcctcaccactgaacattctgaaaaacaactacaaaattaaggtccagattaattcagtaatccttctaaggaaggatatggcgcaggtgcgtttcaaaaaaatggtactggatttatctggtaaacccgcccccggatacagagcaacagagtggatttcgacgatttcttttgactgggataaagatatcaaaacagaaaaagagcgccttgtgaatccgctgggactgcaagttctgagctaccaacctgatccagaggttataaaatgatgcttaaacgcactactgcgatagttcttttgtcgatgctacaagtacctggtgctttagcagctatgtacggcacaccatcggaacgagacgggcgtattcagaccgtagattataacgagcaggatgtatttaatgtgcgcgtaaaagcaggcgcacaaacaacaattaagttcggacaagacgaaacaataaaagatgtcggaattggtgatccagaagcctggtcagtatcggtcagggacaacactctgtttctgcgtccaaaagcagaagaaccggatacaaacgttaccgttcagaccaataagcatatatatcctctttacctgatatcaaccacgaaacaacccacgtatattctgcgttttaattatccgaaaccaccgtcagctaccgtaatgactgaaaagccatttccatgcactgatggtggaataattaatggtcattatcaactcaagggggacaaatcaattttcccttatcaggtatgggataatggcgaatttacatgcatgagatggactaataaacaggaaattccggtcctttatcgtgttgatgccgatggaaatgaacatctggttaacggagacagaaataaaaacacaatggtttactatgacgtggctgaaaatctccgtttgcgcctgggtgatcaggttgcagatatcagaacatcatcaatcgttaatcgtccgtggaataaaaaaggtacgtcaaacggaaaaacacgagtagagaagttcagctatgaaaaataaagatgatgaaaaaaataatgacgcgggaaatcgcggaattatcgaagtaaaaggtaaagcagcaccaaaaaaaatattaatcctcatcatattactgattgccgcgttatttgtgatcattatcttgtttaaagttctgtcacgagaacaggtcgttcagcaaacacctcttgagaagtctgacgagacactggtcacaaataccaacaatggcgtttcactgacaacaatgatgaaaaacatcgaagaaaaggaaaaactcgatgccgctaaccgcaggaaagcacaggaggagcaagaacagaaacaggcagacaatgccccgtcagcgccagcatcacaaaaggccgatcaaacagccgtcaatgtgatagccaacggcactccccaaaccgccagtggagatccaaaccaaccacaaccattgccaaaatccgtccgacaactgatgggcgacacaatggtgaagatcgacaatcaggaaccaggcgaaaaaaaccaggaaagagatgatttacagggcagtcagtacgcagacggaaaggtatcccctgtgctgaaccgccgatatctgttatctgcgggaacagcattatcctgtgtgctcaaaacgaaaatcgtaacctcttatcccggtatcacaatgtgtcagttaacacgagacgtctggtcggataacggcgaagtgcttcttgcccgtaaaggagcattactgatcggggagcagaataaagtcatgacacagggagtagcccgtgtgttcgttaactggacaacgctcaaagatgaaaatgtcaatgtgcgcattggcgcacttggcactgacagtctgggtgcttccggccttcctgcatgggtcgataatcattttggtcagcgttttggtggtgcattgctgctgtcattacttggtgatggtttagatattctgaaaaacagcacgcaacaaacaggctcaaacagcaatatcacctacgaaaacacatctgacgcaacaaaagaaatggcaaaaacaacgctggacaatacgataaatattccccccacggcatatattaatcaggggactgtattgtctgttattgttccgcgaaatatcgacttttcatccgtatatgaacttcagtaattcagtaaagcaattgatatgaataacatcagagataccagtaatacatcacaaccacgagataacagtaaaaccgcaagacgatatctggatatgacgggtatccagtctgttcttaatattgaacatgtcacagaaatatctgtgaataaaccaggaacaatatggtttgaaggaaaaaatggctgggaatctaaagatgcgccagacgcgacttttgataatttaatgacacttgccaaaactctgacgaacttatcaaagataaaaataccacttagccatgataatcccattgcatcggtagttcttcccggtggggaacgtggacaaatcatcattccacctgcaacagaaaataacagcgttgtgatatctatccgtaagccatcattaacgcgctttactatagatgattatgtccgaacagggcgttttgataatgtcaggattgcgacgaaacacgaagccatcctgactgaacggcaacgctacctgtatgaattatcccggcgtccagatggtcaatctaaagctcaatttttaagagaggcagttaaagaccgtcttaattttttaatcgtcggtgggactggctccggtaagacaactatagcaaaggcaattgcagatatctttccacctgaacggcgttatataaccgttgaagatgtaccggaaatgtctctgccgctgcatccaaaccatatccggcttttctacaaaaaaaataccgttgaagcgaaggaaatcattgaagcgtgtatgcgattaaagccagatcacatctttcttgctgaacttaggggtaacgaagcatggagttatctggaggcgcttaatacagggcatgaaggctcaatcagtaccattcatgctaataatacttatgcctcattttcacgactggcaagtattgtaaaacaatctgatgttggtatgactgttgatatggacctcatcatgcgcacgataaaaacatcaattgatgtcattctttttttcaaccataccagaatgactgaactgtattacgaacccgaagaaaaaaatcgctttttgagcacaatgtaaattctggagataactatggatgcaaaaaagacggggggattaattctcttcctgttactgcttcttgtgggtgtgcttatagcctcaaactatctcggtggatacacagcattaagatattcatccgttgatatgtctttgctcaagtgggatacattccattctgtaatctcaacattttctggcaacccacaatataaaaaactcgtttttatggcatggtttggattcagcgttccattaatattctttgccatattcatgttaattgtcgtgattgggattatgcctaaaaaagtcatctacggtgacgcccggctcgcaactgatatggacctaagtaaatcaggttttttcccggataaaaaatcaccttacaaacatccaccaatactcatcggtaaaatgttcaaggggagatacaaaaaacaatttatttatttcgccggacaacaatttttaattctttatgccccgacacgttctggtaaaggggtggggattgttatccccaactgcgtaaactatccaggaagtatggtcatactggatatcaaacttgaaaactggtttttatcagccggattcaggcaaaaagaattagggcaagaatgctttctctttgcgccagccggatacgcggaaactatcgaccaggccattaaaggacagatacgctctcaccgctggaatcctcttgattgcgtcagtcgcagtgatttacttcgtgaaacggacctggcaaaaattgctgcaatccttatcccggcaagtgatgatcctatatggtctgattctgcacgaaacctttttgtcgggttaggactttacctgctggacaaggagcgttttcacctggaacagaaagccaaaggtcataatgtaccggacgttcttgtttccatcagcgccatactgaaaacgtcggttcccgatggcggcaaggatctcgccgcatggatgggacaggaaattgaaaaccgtagctggattagcgataaaacaaaatcattcttctttaagttcatgtcagcaccagatcgcacaaggggaagtatagaaacaaacttttcatcaccgctgagcatcttcagcaaccctattactgctgaggcgacgaatttcagtgattttgatatccgggatattcgtaaaaagcccatgtcaatttatcttggtctgacaccggatgctttaatcactcatgagaaaattgtaaaccttttcttctcattactggttaatgaaaactgtcgtgaactgccggaacacaacccggacctgaaataccagtgtcttattctcctggatgaatttacatcaatgggtaaatcggaggtcattgaacgcgctgttggttttacagcaggttataaccttcgctttatgttcattcttcagaatgaaggacaagggcaaaaaagcgatatgtacggtcaggaaggatggaccacattcactgaaaacagtgctgttgtgctttactatccgccgaaatcaaaaaatgctctggctaaaaagatttcagaagagattggggtgcgtgatatgaaaatatccaaacgctcaatatccagtggtggtggtaagggaggaagttcacgtacacggaatgatgatgtaatagagcgcccggttcttcttcctgaagaaattgtgtctctccgggataagaagaataaagccagaaatattgcaatccgtgaaattataaccagtgaatttagccgaccatttattgccaacaaaataatctggtttgaagaaccagagtttaaacgccgcgtggatatcgcccgtaacaatcatgttgacattccaaacctgtttacacaagaagtcatggatgaaatagcaaaaattgcagaaatttatctccctaaagctggaggaaaaaaagtcatggttgccggaggcaatgtgattactaatccagaccttgataatcacgataaaacagacgtatctgaataatcctcgcaaccagcaaatagtattttgcatattccataaggtaattaaacatgaataaaaaattgctttgtttattaatatcctcttttttattatcaggctgtgcaaacttcaaaaaaatcaatgctaatgaacttgctgccgaaagagacgcacaaaaagcgactgaatacgcgaaaaaaattcgtaataacccggttatccaggattcaacaaaacaatggattaatacaacgccaattattgaaaagcaggtaaagcaatcagcgccgccctgcccgattgtgattaatactcgttcagatattgagctacgccagatcgcacaacgcatcacacaaacctgtcatatcccggtacgaatcagcgccgatgtctggacctatctgaacggtacaggcactggctcaacacaacaaatgacaggctcaattccagcacctgatgcaaatggaatggttcctctggcgtcagtaggcagtcagccagtaaaagtctcttctggcggtacatcactccctgaactgaatatctccgggcttcctgccctactgcaaaccgtatcttcacggctgggaatatcctggaaatacgataaaggtcgtatcacattcttctatctggaaacgcgctcattcccgattacatatatggacagcaatgtggcatacaactcaaaagttgtgagcggcacaatgtcttccagtggcagtaccggctctacaagttctggcggtatgactggcgacgcatcaaatacgcaaactacaaccgtggaaatgaaatcatcgctgtacaacgacctgaaaagcgaagtttcctcaatgctgacaccaggtacagggcgcatgtatctgtccacaggttcactgacagtaacagataccccggatgtactggacagcgttcaggagattgtgaacaagcgcaataatgaaatgagtcgtcaggttgtgctgaacgttgaaatcctgagtatcaagaaatcaagccaggaacaggcgggaatcgactggaacgcagtatttaatgatggtcatcttggtctgagtcttggtggctcatttggtgatgccgccgagaatgttattaccagtggtgtatccatcgtggacggtaagctggctggctcaaaagcatttctgaaagccctgtcgtcacaaggcagcgtcagtgtcgtaacgcaaaactccgctgtgactaaaaacctgacgcctgtccctatgcaaattgccaatcagcagggcttcattgaaagtgtcacaaccgattctaccgccaatgtgggatcatccacgtcactgaatgcggcaacaataacaaccggattcaatatgactctgcttccatacattcagccggattcacaaaacctgcaattgctgttctcaatgagtctgtctgacaaacctacttttgaggtgttcgaaagtggcggcagtaaagcacaaacaccgaatgtggatttgaaaacaattaatcagactattgatctgaaatcaggccagacagtcattctgagtggattccagcaatcaaaccggaaaaccagtaagcaaggtgtaataaccccctccttctttggacttgggggtggcgttaacagcgaagacggcgacacgattctggtcgttttgattacaccaaatgtgcttaattccggctccagtgcagtaataaaaaatgtgaactaattaactgaaaactccctgaaaaaacacagggagtttttttggaggtcactttgtctgagaataatcagaataaccagaatttcacttcggttattaaaaacaagcgtgcttttttctccggtctggactggaaaacgcttccttcagaagaaaagaatgcgcgtacattcgcaagaaaaaacgacgctgaatattttctctcctgtcagtatcaggattcagaaaatgaaaccaaaacgatggtggcatttatcagaaaagaggatcttcccacaggggcgtcctcattctggtcactggcactgatgataaaacccctcatcgaacctgacggatacgctatctgcgaactcggtgatctttatggctttgtttcctgcgtcaataacgttctcgtcaacgatgttgtaggtaacaaaagtcagatcatgagtgctctgacaacatttcttgagtttaatgaaacaccagaacccggctggaaactataccagcctgaatcatgggatatcagccaggcactcccctcactcactctgtctgcgttgattgacgtaaaaaaaccgccgaaagaggcggcgtttactcgcgtatcccgaaaacgtcagttcatgatttatggcggaagtgccattctggccatactgctctggaacgggatcaccatgtaccaggaataccgggaaaaagaagctgcggcagaagctgcacgtcttcgtctggcaaaagaaatggcagacaaacaggcaatacagattgccccaccgtggcaacatttacctgaaataaaaccatttattgataaatgcattgataaatgggatgcactgcccttatcgatcgccggatggcgttttgaccttgctgaatgcagcacatccggtaatgacgggctgttacgcacatcatataaggaactgagcggcgttacggtcgaggacttcagcacacggatacgagaaatattccaggggacaaccacagcaacttttgtattgccagaaggcagcgccgggggattttctcttcctgtcagttttgacgtttcgcctgatccaattaccccggacacattgccacaggcaacagatattcaggaacgcctgacaacatttgcacaaaaaatgaggttaaaactcacctggcaggaaattgaaaacacaaaaacagatgaagaaggccgtccaataattctcccgtggaacgagtatgaattaatgattcagaccagcaccccgccttcaatacttttcgctaactttcatgaacctgccgttcgcttccagtatgcaggaataaaactggaagaaggaagactgaattatgagattaaaggtgcattctatgttaaaaataattaaaccaacgattatttctgtctgttttttcagttcacttgcttacgcaacagaatctgaaagcacaccaaaagacgaaataaaatattcatctccgaccattttacaggtagagcagattcaggctgaaacggtaatttacgaagcaaagctggcgcgtcagaaggctgtcagtgaattgcgtaatcttgatttgaatggtgtagcgtccgcaacgccagcaataacgccctcttccgggtattcttctcttgcagataccgatataccagcgcaacgtgtagccgctaaatcacttcgtgttattgaaatatttggtacaccacaacaaatgtcagcacgaatttctctcctggacgggtcagtaactgatgtcaaggtcgggcaaagtattcctggtacttcttataaggtggcatcaatcactggtaatggcgtctggattcagaatggtacagagaaacgccagcttattctttaatgctattgaaagagacgacacataatgtttttttctgacgcagactatcccggaaaagatatttctgatgttgtatacgtcagtatatctgaaaaagacgataaacctgttcaggtttatatcgctgataacagtaaaggacagcgtgctgttcaggcttatattggcactctgaatgttaaatatcccggacaggtaaatataacctcgacaactcttgatgttatcgcatcccgctaccaggacagcgaaaaaaggtctgattcaaactcatcacaacacttaaacagcaaccaggaaaaggtcattagctacctggcgaaagcaaacaaactgggaagttccgatttgcacatcacacctggtcgggacggctccgagttcacttatgtcgaagcacgcgtgcatggggaactggaaattctggatgtcatcccgcgtaaagaagggctggaattgctgggtgctgcctattctggaatgagtgatgttatcaaaggtacgcagtttgaccctgcaataccacaggatgcacgtatcgcagagaattttctgaagcctgtaaatctttttggggcgcgctattcgcattatccgtgcgtgggtggtgtgtacgcggtcttccgcctgattaaagatgacagcgaggatattcccactttcgaagaacttggctacatgccgcaacaaatccagacaatcaggcgaatgttacaacgcccggaaggaattatcgttttatccggccctacagggtccggtaagtcaacgactctgagaacggcttcagaagcctatctgagcacgtttggtttcaaccataacgataatatgcgtctcccccgaaaacgccttttcaccattgaatcaccgccggagggccgcattcccggcgcaatacagacggcagtcagggattccgtcgatggctgggttgacgcgattaaatccgctatgcgacttgatccagacgcgatactgaacggcgaaattcgtgatcacgcatcggcattagcagcaatcaaagcctcgatgacaggccaccttctgttgacgaccttacacgccaacgatgccctgaatattattgagcgccttgaaatggagaatattcaggccaggctgattgcagatcctcttctgtttatcggtctgctgagtcaacggctggtacaaaaactctgtccttactgtaagcgcacttatgctgaaatggcagacaaactgagtacagaagaacggaaactcattgaggaaaattgcctgccggaacaggtccggttgcgcaatcttgacggttgcgagcactgttataaaggcgtaacgggaaggacggttatagcagaagtcgtctcacccgacgcacgtttttttcagttatatcgtcagtccgggcgtctggaagcaaaatcatactggcactatgaacttggaggaattacccgtaatcagcacttattacacctgattaatcatggcctggtagatccgctgtccgcacacttcatatcccccattgacgaagataaatactcaatgctcccggaggggacatggcgataaaagatatatttgagaaactcaattcgatagaaattgatttctctggaatatcccactggctggcaaaatacacattcaggtattccagaataagtttatatgaagatttatctggaatgttaaatgatggcataaatgtaaagcgtgctcttacacacctgattgatgtagaaacagactacgggaagaaaacggggtcttctgcaacctactatatttgttgtgagtgccttaatgcactgaataacacaggggctatatcttcagcattaaaaaaatatataaaggaggatgaatatcaattaatatccagcggtgaaattcgcggcgaccttgccggaggattagttcaggccataaaaattgtcagaagtcgttctgaaatgacaatgactcttgttatgtcgatgatttatccatccgtactggtttttggttgtctggcaaacatgtatatggtccacgataccataacacctgttttcctttctctcgcaccgaaagaacgctggacaagttctatgcgattactgacagatacgtctggtttcctgatagaaaacggaacgtatattctctgcttctgcatcgtactgtttttcctgatcagatattcgcttgcgcgttatacaggaccgggccgtcagtatcttgattacattcccccctggtcactttataaaacatttaatggtgtaagttttctcttcaacatggcctccatgttaagtattgatattcccgttgcaaaagcactggaaaggctggagaaaaacagcactcaaaacagatggctactcgaacgaataaaagaaatcaggagatatgttttacttggacagtcacttgcaatggcaatgaaaagttgcggttatgacttcccatcgaaattatgcattaacaaactattacttcattctgaaaatgctgacaatgcattgatgatgtctaactatgctgataaatggctggaggaagcaaaaggaaaagtcaaatcaacaggagtctggataactgtagtatccgcattaattgttttcgcatttattgtaatgatgattactgctctctacgatgtcagtaacgtcctgcaacactaatccctaatatttttaacctctcaataaataaggaattatttattatgtcttctattaatattttaaatatgcgttctgttttttcttctctttctgcacgccgtaaaaaagaacaggacaaaggggcaacactgatggaagtgttattggttgttggtgttattgttgtacttgcagcaagtgcatataaactctattcaatggtgcaatccaacattcaatcatccaatgaacaaaacaatgtcctgacagtgattgccaacatgaaatcactgaaattccaggggcgttatactgacagtaactatattaagactctctacgcgcaaggattactgccatccgatatgatcgcagatacaactggcgcaagcgcgaaaaacccgtggggcggctccgttacaatcacaacctcttcggataaatactccttcaatgttgttgaggccagcgtaccgaagaaaaactgcatggcaatggtaaacgccctgcgttcttccagcgcaatctccaagattaacaacacttccacatcaactgtcgatgcggcaactgtttgctcatctgacagcaatacgctgaccttcagcactgattcctgatttttcatgtgcatcggataagcgccttcgggcgcttattttttccatgtttacaggaggagtattgtgcgttctgttctttatatcctgctatcatgtatttcatcattaatcttttcattgcaacccgcatattcagcgacaacgacccaatttgatgcctgctttgcacaagccgggcaacgttatctgattgatcccctgcttctgaaaagcattgccactgtagaaagttcactcataccagaccggataaatcacaacaaagaaaaaggaaaaatattaagcaccgattacggactgatgcaaattaattcatcacacatccccaacctgaaaaaacttggcgtaataaaagacaaatcagagcttattgataacccctgtctcaatatacaaattggcgcgtggattctggcaacacattttcagaaatgtggcataaactggagttgtcttggcagttataacgctggtttcaaagaaagtaacgaacagaaaagaatcaaatacgcacgctatgtctacaataaatacatggtaaggtaacttatgctaaacagcatatttaatacggcgatactttgctgtgcaaatatcgtctgtcaatgctacgcctacaatgaagtaaaattccgtttaaataaacttaatgtatcttataaaaccggcacagagaaatattactgtctgatactgacaacgcttgccgttctgtatctttcattaaaccagctatcactgattcaatctataatagtgattgttttctatgctttccttacattaatggcttgtatagaccttctttcatttctactaccacgcctttataccgtgacatttatcttctctggcctgttatatcagacatggaataacaatatattgtctggtttgttttgtgcaatgctgatgttcttcattatgctgtttgtaagactttactttgcatataaaaacggaacggaaagtttcggcatgggagatgtgctacttattgcaggaactggcgtatggtttccaacgcctgagattgcctgttcaattgtatttattgccgttatcggcggaattattttcttcactcttggcggattaaacaagcaaaaaaaatatatcccattcggtccgttcctttgtggcggaatgtttgtttactcactcgtaccgggaatattattctgaggattaagagcaatgaaaaagacagataaaggtgtatctcttcttgaggtattacttgtcatcggcataatggtgatggttatccctaaagtttatgaaaacattgaaaaccatctgaataatgttcgctggcagaatgcagcagaacacgcaaatacctataacaccgctgttcgtaattatgttgctgacaatgcatcaacactacttgctggctctttacccaaaacaatcacgccagcaacactcattcagaaaggctatctgaaatctggtttttctgaatccaattttggacaaagctacattaccggtattgcaaagaacagcaaaacatcccgtctggaagccctgacctgtagtaatggcggtcagtccctgtcagaagccggaatgcgctcggtagcaagcatgattgaagggcttggcggctacatcaacagcagcaagcaggcgattggcgcgggtggcggctggtctgacacgccttcaaattacgggctgaactgcgcgaccgggcatattgcaatggcacttgttggcgctgatttgcaggaaagcgaccgtttgtatcgttactccataaccaatcgtcccgaccttaacaggatgcatacggcgattgatatgaacagcaacaatctgaacaacgtcggcactttaaacggcaacgccgccgcgctctccggcgatatcagcgcacgtaacggtacgttctctggcgcaatttcaggaaatacagccacaaccaacggcgatatcacttcgaataatggctggctggtcacaaaaaacagcaaaggctggatgaacagtacctatggtggcggctggtatatgtccgattcgtcctggttgcgcagcgtgaataataaagggatttatactggcggccaggtaaaaggtggaactgtacgcgctgatggacgcctctatacaggcgagtatttacagcttgaaaaaacagcaacggctggcgcttcctgctcccctaacgggcttgtaggccgcgacagtacaggggcgatactttcgtgccaatccggtcggtggtctggtggcaataaagtgaactactccgcctgtaagtggtatcaatcatctgtagcaatgaatcacttcattggcgggaaaagtggaggatctatctactacaaacccattcaatgcccgaccggatttatcatgacaggtacacgcatgtatggcattggtgatggcgttgatgaggaacacgttgatgcttattgttgccccttcggttaaatcccagcaccaggaagattcaggcatgtaacagtaattgtgccgccggactcataatttccccacgcataattattcacataccaaaccttgttttggtcggagtatacctgctgaaacccaccaaaaggcgcaccattaaggtatgtccacgaacagtacgcatgtacgccaatgctcagatttcgggtgtttttcccgatattgtacgtactggtagtgaagttcacttttgccgttgtccagataccggattggcactggcccccgtgccaatccggtacgtggagaagggcatcaggtagcactgttctgacaggaaaaatagcaaatggacaacagatcccattgccatctggtttttctgccagccagtgtacctggagtgtcagtaatgcagaaaatccgcacgggtggaagccgaattattttgcggggtcagttgcaacctatgatgccaatcgaattgtgaaatgcggcttctatgacgaatacaacttttatggcggtactcaccgaactgacctgtcggggaaatgtagttacatcgtggtttgccagtgataagtatcgtcactggcaaatggcgtaaactgtaattgaaccattttgatcttcggtcgtgtcgcaactggcagtccatgcattgttgcctgaaggcatggaacgcgtgagccatataaatccggtatttgatctgcattgaccgcctccaccaatgactttcttgccagatggacatgttgccgttgctccaggccaacgccacgcagtagctgaagcggtaacaatttggctatcacctgcgccaatttttttccacgtaccggattggcacggaggccagtgccaatccggtgtgtggagggcattaggtggaaagctcaaggttactcaactttccagcactggttacttggggcaatttgacttttgtgccattgccagaatgggaaatgctgaggattctcattactgccaggtagtcgagagtccatctggttcacgaaaatggtacaaatacgagcacaagacaggttgtattgcgtcctgtgtaactctcaattaagtttggtatccaaaaactgaaaatacccctgagccacaagagtagttttgggccggataagaggtgatctgataagttgcgccagcagggacagcaaaagagatgaatgctgtcttcccataagatgggttgttgctcgcatttgtgctaatcaatacccctgcaacgtatccctgcaatctggatgtgttagcgcaatctcccccggcggaaccaccattccctccagaggcgtaaacaaacagcgtaccacttcctgtattgcgaccagtaaatgatcctctgtgtgagccaagattactgtaactaccgttagaggaaccggaagttctccacacaccggattggcacggtgatattgcatttcgaagcaagaatctctaccttccccccttttttgtctggaggggatatgtttcagaaaatcaaaattcgcaaaatgacaatcagccgggcgctggacaaatacctgaagacagtatccatccacaaaaaaggccatctacaggagttttatcgcgtaaatgtgattaaacgtcaccctattgctgaacgctatatggatgacattaccactgttgatattgccaattatcgggatcaacggttggcgcaaattaacccacgaacggggcgtcaaataaccggaaacaccgtccgtcttgaacttgccctgttgtcatcattattcaatatcgcccgtgtggaatggggaacatgccgcatgaatcctgtcgaactggtcagaaaacccaaaatcagtagcgggcgcgatcgtcgcctgacttcaggagaagaacgccgactttcgcggtatttcaaagaaaaaaatcaggctctttacgtcatttttcatctggcgctggaaacagcaatgcgacaaggtgaaatcttgtcattgcgttgggaacacgtcgatctgcaacatggggtagctcatcttccaacaaccaaaaacggtgctccacgcgatgttccgctatccaggaaagcccgtaattacctgcaaatgctgccgacacagcttaacggtaatattttttcttatacctcttcgggattcaaaagtgcctggcgaacagcacttcaggaactgaagatagaaaacttgcattttcatgacctccgtcatgaggctatcagccgatttttcgaacttggtacattgaacgtcattgaggttgccgctatttcaggccatcgctccctgaacatgttgaaacgatacacacaccttcgggcttatcaacttgtcagtaaactcgatgcccgacgcaagcaaaccagcaaaatcgctccctattttgttccctacccggcaacggtcgagaacagaaacgggcaagtcgttgtgactctgagtgatttcgacctggaaacaagcgcagccacaaaagaacaggccatatttcatgccagcgtgttgctgctacgaacactggcacaagccgcccagcgaggagaacgcgtccctactcctggcgaacttcctacaaacattgatgaacgggtaatgatttgtccattaacaaattagaggattcacttatgatagaacaactacagagtgattttttattctggatatttatttacttcctgatagtaggtttgcttatcagaaacattcatcttaccagaaaaattaaatccatcgaaaaaaacaaaatgttcccagcggaggaatatgctgtcctggacattgaacagcatatgtccaataaatatattgggcggctagtaacccgttttatgaagagaactaatggtgcacctttgttaattgtgtttccagaatacgataaaggagacaacaatgaagacaaaaattctccaccattccaacttgtaaaactaacatccaacatcaacaatattaaagaaatttattccaatgatgacttaaactgttttctgaataatatttcggcacaaaaaaatttatatacaacgcactctggacctagccaggcatggattgaacatgcatatcctttgcaacaagtaactattctcttacaaggcactcgtcatagtgaaagggaagatataatcagtcaacttgagattattctttccagactaaaaaatggagaaaatacaggttttgagcatgacgatgattttggatattcatttcagtatgatgccgcagcagtaggaaaatcatcatttttcgatgaagcggcaggaagaaaataagaataacgctctatccattgcacagacaaattaacgttaatcttttatgaaaatcttattaacaatatttatttatctgcttaccgcttttcagtctgcaaatgcaggtggaataccttatacatttaaccagaaaattcttcaggggaaagttattcgcgttctcgatggcgacaccatagaaattaaaacactacccgcaaaaattgttgtgtatgaagttccgatccgagtccgattgataaacatcgatgcccctgaaaagaaacaaccttttggacgctggtcaactagtcagcttaaaactctggttgcaggtaaacaggtgacagtctcttattcacataaagaccgctacggacgcattatcggtcatgtgttcacgacgaacggcacggatgccagccgctttatggttcagtctggcgctgcatgggtatatgaacgttacaacgtggatgagtcattaccggctctgcaacgggaagcgcaggaacaaaaacgtggtttgtgggccgatgcaaatccggttccaccgtgggaatggcgtatcagaaattaagggggcaagaaaatgcattcttcttttggtttgccatgattctgtctttttatctttgtgcaatattaaaggcttctttttaacagggggcggcatgtatgtaattaatcaacagacaagggacaataatattcttacgttgcatgatgtttttaaaatctatcaaaatacaggggggcttcgtcttgtaaaaacagaggagaatgaaaagtacatctccattatcatttgtggcgtttttcgtattagaaaaaacaaaaagaataacaaaatcactttgtggggatacaagctaagagataagcacactggggtatggaccagaagaaattcatttcctggtaagatttttttattctggtctaaaaaatctgcatacgacatggacgactggttaaaatatgcgattagctacatcatcaaatcattgattgaggctggatattcaattgaagacaaactctatttgttacgcattggagaggaagaggaaaacagcgagagtcgttatatttccacactatatccatccaatgtatattactcatatgagtatggaatacatgacattgttcattgccttggtaaaatagcatcattcaactacccctataatacacgatatatcagcagacatattttactcgcagagataaaaaacaaaatttatcagagagcattaaaaattataggggtggataatgaatttaatgcttcaaaagcattgagtaaagctatatggataatggtagataaaaagatatttgcacaatatgccagagcttcacattgttcgatagcttacaattcaattcgtcaggcattatttgaggactatctggatttttcaaagcgaatccatattgtgaatgatatggattttttcggattgtggcctatggttggtcgtctaagacaacaacataaaaatggtcagtttatactatctggaaagacaaaagagttatatgaaaaaatcagttttccctgcaaacttagttatggtgagttcagaagtttacgacatgttagtttgtcattagtatatgctttaaatgataaacatgataatgcatcattcagatttacagtcagattattacgccatccacttatcaagaactatcctgtgagagcaatttactggattatcgattatattagcattcgagcttactcagaaaaagaaaatgatatttatcgtatatgctcaaaatggctagaatatcatcgtgatttatttaaaaacattggcttttatgaccgtaatactgaatccaggcaaacatcacgctgggaaatggaaacgaatcagttgtgtcatgcaattgactggttgttagcagaagaacggttaattcataaaaaccaggagtggccttctttctggagactatctgatgaatggacgcgacaagtgaagaataacgttattcccgtaatcccaaaatggaaaggaactgggataaactggcagaaagttgataacggtgtaaatgaattaattacatttgatgctctgtgtcaggaaggtcaggagatggaacattgcgttgccagttatgcagactggtgtgcatctggagaatatattgcaatttcagtcctgatggataatgaaagagccactcttggactttcacgaaaagaacatgatttaacctatcagtttgaccagatgagaggtattcgtaatcaggctgtttccagaaacatgctaattaaaggcaggcatattttaaaaataatcaactcatcactaaaaagataatgagtcatcgcatctcattacagcaccgatgactgggtgtttattctttctgaatacaaaaactgactgaaagataaggaaagaaagttttcttacctgtttgtcttacgcaatggtgaactggttcaccatgaggtcaacaaatcagagcttctttgagaggtttaacatgcaatatgcattgcttgatggatttgaacgaaagtttttgctggatgctcttgaattcggtgttctgaaggactggaaagaaaatccggtaaaagaacttcctgatattgatgaatctgctcaccccttccatgtctgttatggtggatatttattaaatcctggtgtttcagattcagatattagcagaaaaataaaagaccagacaggattctggctggcagctattgatgatacccgcatggattgtcattcaatagcttattatgatattcacacactccctctgatttcgtgtggtcatcaaaagatagttccttttgccgcgttaataaaagctgatgaatgcatcatttcaaaaatttcttcgtattctggttttgccgtaacagcctttttgagaattaaagaccaggatattgcaactaatatacttaaccgtgaggggatttttgcttttaatggctgtgaacgcagattcagacatccagtaagtgaagataactggcaacaggcagtatcagaagaacgtgctatccgttgtgccaaaagattaattcaatgtaaaggataacaaaatgaaactttttatcgcagaaaaacccgcagtagcgaatgatattgttaaggcgcttggtggcaattttacccgtcatgatggctggtttgaaagtgataatactattgtgactaactgttttggtcatattatcgaatcacagccccccgaaaactataatcctgaatacaaagagtggaagattgaaacactccctttgcgtctttatcccgtaaaataccagcctgtagaaagcgccgaaaaacaggttaaaacgattattgagcttatcaggcgtgctgatgtgaccgaaattattcatgctggcgatcctgatgacgaaggacagctacttgtcgatgaggtcctggaatatgcaggcaacacaaaacccgttaagcgcgttctgatcaacgacaacacccttccggctgtgaaaaaggcgctggcaaatcccaaaaataaccgtgacttcagaggactctatctcaaggctctggcgcgttctgtagccgacgcgatatacggtttatccatgacgcgtgcttacacaatcccggcaaaaactaaaggctataaaggtgttttgtctgtcggacgggtccagacacccgtgcttggcctgattgtaaatcgcacccgtgccaataaaaatcataaatccagcttctactacaccatgaccggacattttcaacgcggcgctgatgttatcagggcgaactggaaacctggtgagttcgcaccgctgacagaccgcaaattgcttgataaaacctgggcgaatggaacagcaacatcacttgcaggaaaaccagccacagttgaagcggcagcaacagatgataaaaaaacggctgcaccgttgccctttaacctggtacgacttcagcagtacatgaacaaaaaattcaaaatgactgctcaaaaaacgctggatatcacacagcagctacgcgaaaaatacaaagcaattacttacaaccgttcagattgttcatatctttcagacgaacaattcagtgaagcaccacaaataatcgatgccctgaagtcggtgtttgatcagccaatggatattgatacgacacgtaaaagcaaggcatttaacagcgcaaaagtaacagcgcatacagccatcatcccaaccgttagcgtaccggacgtaaacgcactgagcaccgacgaacgcaacgtttacctggcaattgcacaacactatcttgtccagttcatgcctgaaaaggcatatcaggaagtatccgtcgccattcagtgtggtgatgagtcgttttatgcccgtgccaggaaaactacagacagcggatttgaagcgtttcttggtgtggaaaatgccggggacgatgaagcagaagtcgaaaatgatgattccgcttttgatcttctctgtaaaattcgcacaggagaaacagtgacgacaaaagaagtggttgtgaatgagaagaaaacaacgccaccgccattattcaccgaagccactttacttgccgcgcttgttcgtgtcgcagattttgtcactgatccagtgattaaaaagttactgaaggataaagatcgggataaaaaagacgaacatggcggtattggtacgccagctacgcgggcttccatattggaaacactgaaaaaacggaactatatcaccctggaaaaaggaaaacttattccgacagataccgggtatgcgcttattgatgctctgccggatatagctgttaatccagatatgacggcattatgggcggaaaaacagacactcattgaaaacggagaaatgaccatcgaacagttcgttgacgaactgtacaatgatctgataccgatgatcagtaatgcgaacagtgctgaaataaaagtttcccccagcgcgccgtctggtcagtcacaacgcctgtcctctccttgtccttcctgtggtaaacagattgttatcaggccaaaaagctattcctgtacaggatgtgaatttaagatatggaaagatttctgcggcaaatcattaaccgataaacaaattgaaacgttaataacaaaaggagttacaagtgaattgaaaggtttcattagtcaaaaaacaaacaaagaattttcagcaaaagtaaaactggttgacaaagcaaccgggaaactgggatttgagtttacacaaaaaagtaagaaataaatccagcagtagaaatcaaacatcgttgtagctactataggacaaggatgttcttcaggaattgtacaatgaaaacaaaacaagactggctctttcagttaagacgttgctcaacactcgacacacttgaaaagattattgaaaaaaaccaaaacagcctccccccttctgagcttgagtcgtttaatgccgccgccgatcacaggcttgcggaactcacaatgaataaactctacgataaagtccctccatccgtctggaaatatgtatattagttttcatctattaatattagatgtttgatcgacacaaacatcagcaatccctatacacctttcatagaatgaattgaaccctgtatatagcctgtctgaaatggatatctggcaggctatcttaatagtgttataggtggtatgaatgtttttcctctacgagacctacaatttcttctactacctgataaagttaattgtcattcagccacaatatatttgtgtctatatgatattcttttttttcaatgcagggatagcatatagcatcaccaatgatatcgaggatcaagtatgtcgatggcttttattcgtaagtatgttacatgctctgatgattccccccgcagttatcatgccacttatcatgccaccacaggaaatacttcaggaaacagagaaaaggcaggaactacatgaatcaatacccaaaacatgcaaattaaaggcactggatgctcaacaaggtggtttattcggcgttgataaagatgaatgggtattccctgacaataaatcattctatctgcctgaaaagtaccgtccagaaaacaggattacggaactagccatgatgaaagaaggataaagacctatgaagatattcaaattgtttgttctttgtatcccccttctgtttagtctttttttcgctggctacggcattttgtcaaaaaatccatttgaaacactaccgtgtctgtccgccagtgctttttgcctttttctgtttgacatactgaggcgatcatttatgaagtgaggtgtcttgatgttaacgttgaggttgagaaagttttgttggttcttataattatagaccggattaaatcatgaaagaatacgaaaaaacggctttaatatattccttaaaggaaagcaatacattagttcttcggattatactaatctctattttagttgtcggggtgatttcaggcgcgatatacttatataacttggcgatctcgttgtttgattcaaacccaacgtctgtgcaattcaccttttgcggagtaggctgttttattgctctattacttcaatggatatctaatgttgatgcaaattacagagaaagaattggggagcaaccaagtacaataaaaaacattgtacaatatttatttgcagccattattaccattagtttcattacaatggcattaacagccatattagtcttaaaagactcgtccaacatatggctcaacattacttttattgcattattactgtccatttttgtagctattatttctgtttggggttgactttttttcttaaaaagcccgaaaaccgggcttttttcttaattagtgcatgtcctgtgaatcgtcacgctgctgctgcgattcctgatgatcttctctggcctggacaaattgttttccaagagcatcttctgccatttcacgagtgaatccgtgattaagcaaatcggattcggccttctccctttcgaacttcagtccttcccctctgaacttgtcctcaaagcgatcaattgcctcaagaatcttgccgtcttccggcgtgcaatcccgtccctgtgctttctcaatttcatgacgctccacgcgttcagcatttttcattacagcgtcaatcccctgagaaatatgttcagactcgacgcgataaatgacagtatcgcgcttattgagatcatgtagctcgcattcaacccggccccactcaatagcatccttgagagagctgaaatcttttatttcagcattcagaccttcatgtgttgagaaatagacataatccttctgttgttccagtttattcacattttcaatagcccttgtactgaaatggatacctgtaattaccggaacacgagccgatgtttggtcccccgttaaaacttcagaaggtgtttttccagtgatcgcggcaaattgctgctccgtaacatccactctggcaactgcatcaccacgctctaagccatgcttaccagcgaccgcaaggcgataaagaccaccttcccccctggtaatttccgcctccacaacgatatccccattgcaggaactgaactgagaacggtctttaaccaggaagttttcaagcccggagatcatatgctcgttagctgaaatactggcgagtatctcttctggtgattctctggacgaatcccccgcctgttccatcactgccatattagcgtcattaacagcgtccttaattcctttaaaggcgatttcttctcttgttacaggtgtgattaagatatcatcctggttaagcccgtgctcctgaagcatcttatttttatattcagatgcgtcgtgcaatgactcaaaagtcttaatatcttcactaaactcatccttcgaaaaagaaaccgcatacactggagtacggtattcttcatatgaattggcaattatttcaaatggcctatcaaacgttactaatgccccctctggataagaggataattcatcggttgagacagttttagacataagcacaacagtatcaaaaccatcaccatttaaataattgctttcatatttttctattgcagaagatttgctttcctcataacactgaatagccgcatctttagaatgaaagacgataccttcattcaaatcatggaagcgactaaagtttatacaataaatttcctgtttattatgcacctgcgcagtagcctgatcgtgttgagtagtaagctgctcctgaatcagagcctgtgttctgtcaatacctaactcattcacaattttgcaaaattcttttgcgtcgttttcattatcaaaactggcaacgtcaaaaatatcatcgctgtctccaggtacatgtcccagcacttcccaaatctcattttcatcgctatccagagatttcaaatagccaaattcaccatttgtgcctttactaagcatctgtgaatccagggtgtttgccctggtaataacaccaggatcatatgaagatgtggcctgctctgcgacctgtgcttgctccgcgacctgtgctttctccgcgacctgtgcttgctccgcgacttgtgcttgctcggtggcctgtgcttgctctgtggtctgtgcctgttcggtggcctgttccttcaatgcatcacctttctctattctggattcggactcctggctattttcctgtgtttccacctgctcaaacttattaccctgaagttctgcttttaattccagcatcatctgttgatactgctccgggcgtaaaataatcttcatgtcctgctctgcggcaacttcagcgcacatttttttgaaatcttcagagccggtaagtttgagtacaccaccaaacttttccctggaatactcaagcattattccgatctcttcttttgagggatttttacccgcaacgacaaagttccctttgtcggtaaagacaggcttttccgattcctgatcgcgataaacaatcctggaatcctgcttatccatcacaagatcttttagtttggtgttaacctttttcgcctcttctaagcggcgctgggaatccaccgctttctgaagcgaaagttcgggttcgtcagcagaaatggcgttgatttcatcgaagttgagatagcttttgagacgttcaagggctttcatttcatctttatccttatgccagtcagcatgatattgacgaataatgtgtcgcccatctgtgtcgagttcagaaagacgctcaagtgtggttagttttttgtaaacaatcacacccacggcaatatcacgctgttcacgtggtattaacttcaactcgcgtctcatctctcgcagatcattatacagcttgccacgctcaaacctgatagtatttcgtaatgttttttcagataaattcagtgagttaagacgctcacgagcttcatgatgcgtaaggcgtctgtaggttggatagcgcgtatatggcgtgttttctaactgctgtgaataaacttcaagcagaaaggatttcgcatctttccaggcaagattaatatgctttgtcagaaaatcagatgcgttcatattacgattccccacagaaaaccggggggaaccgtcctttgctgttctgattttatgctgcgctggaataatattaaaacgctcggcggcagaagacagaaacctgacaggatcaatatttctgcgaatttctgccatcgttgtaatttcgtttttctctgccgcctcattcagagtctgaaacatcgtttcacacaaaaaagaagagcgttcaagactttttattcctgactctgtgaattgtctatcataatcccgtcgcacatcctgaccaggatgttctctttgcggtaattgctctgccagatcacgctgcgaaatatctgacaatacactgatagagtcgggtcttgtgaatccattgattccgtaaaccataccgcgttggggcatacgtgacaatccgactgttgcttcagattgacggattctggcaaactttttaggacacgacttgtaacctcccgctcgtcctgacgtttgctgagaatttctttcgttaagtttttctcttgagtcatattcttttatcctctctttcagaaattcaatctgctctgcttcagataaacttgtatagtccttacgaacgctggcgttgagaaaaacatgtttaatctcgtgactggttttgtttacccaggtattgagacgtttttctatttgcttaggcgtaggtttttgaagagtcaactttccctcttcaatatagtttttacgaaacaacgggcttttcagattagtgaactttttatctcccggtaacttaacagcaatatattcactggcctttccttcatttcttatcctaacctcaccatattctgcaacaatctgtttgaatacagcataatcacttactttttctttttcaattcgataattcaattcattcttaaatgcagaattacgctctacatcaagatctgcttttactctctttaaaataacactataatcactattttttctcggaaagtccttcgggctggcaagattatatttattgttaatatgctcctgtattgcatctagctgttcgatagtatgacctttccctataaggccaacaggatcaagtttatctcctgtaactagattaacctttggaatgacaatatgaatatgaggctttctttcaattaactctcctgtactattatcctgaatatgccggatttttggcaaatgtgcttcagcatagaaagaatattcttcaggatgataagcattcatcaataattttttataatcatccacaaccgcctttaacatttcatttgatacgtgactttcatgaaaagacaacgtaatgtgcaaataacggtcctgtttgttgtcttcaatagaattgataatcttatctgtagtctggagatcaccatcaagaacaacacgatgatcaagttcatcacgtgtgtactgacgttctgctttgcgaccatttatcaggtaatcaacaataccgtcattaccaccaccatatctgacaatcatttggctatctcctgaaggcgatcacgaataccaatcagcacatttaaaatctttttataaagcgcctctgatataataccctttaaatgatctgagtttaagcggtgagctatctggttaatattattcccagcccaacttaactgagaaagacaccgtttgtattccgggatatggcgtttatctgatgtgtagttttttattttaccaatagtaagcagcctgaaaaattcagacttactaatttcaagctctctgattgctctgtcaaatggagcatactcttcttctgtaagtctgaatgtcacatgaacacttttgttggcttttttcttcataagtcctcaaggttcgtagaaccgcactagaacggctgcgccgttcggggttgcaaaggggcgtcccctttggcacaagcattgtaacatgcccggaacgggcttgtgtacaaagcttatcgtgcctgtgttttagaaggacaaaaaaatgccgtgcatacagcccacacaatgactcacataatcacccacaactcaaaacacacagcccacacaatcacccacactttaacccacaaaaaagaccacaaccccattgacaacccacaaaacaacccacataatcacccacacaaacggcgagcaaattgctttaaataaggtattatgccaatgtaggaggtagagagagagaggaaatgtaacaaatgaaaaagatcgagagtttattatctccaatatgcgaggctataaacgaaacaaaatcgaaatcaaaacaggctgtcttcaatatgtatttgcaaaatatacttgaagcaaagaaatattatacatgggagcaaatagctgattacataaacaacaacaccaagacagaactagcccaaaagacttatataaatatgacagagagggctaaaaaaagacaaaaatgcactgaaccaaaagaacaggcaaaaaccatagatgtaattgttcagaatgaagctaaaggcgatgaaccgagagggggggtaaaaggttttttttcaaacattagtgagaacaaaaaagaaatagagcacgatccaagtgctacgaatgaaaaatttataaataaatatctttaagtaaaggagcattataaatgaaaaactcaatcaatttcatccttcagggtaaaggtggtgttggaaaatcattcgcgaccgcaatactggcacaatactttattgatgaaaatcacatggataatatcgtagtcggtgacacagacccggttaatacaactacggttaaagtaaaaagattaaatgcagatttgatacaaatcactgaaaacagcaaagtaatacaatccaaattcgatccaatgttcgaatcgatgctgaccaatagtcagaatacttttgttattgacaatggcgcatctacatttttaccgttaattcagtatttcaatgataactgtgttatggacatgtttgaagatgtagaacaagacgtttatatccatactgttatcgttggtggacaagctcttgcggataccttgcagggatttgaagaactgaaagaactggttaaaggaagtaaggtaaaacttattgtctggataaatgaatttcagggtattccagcacttgaaaatatcccattaatagaaactaaattcattgaaaaaaacaaggatgtaatcgctggcgttgtggttattcaggacagaaaaagtgatgcctttgcctctgacatcaaagagctaacagaaaaatcactaacactgaaagaagctcttgagtccgaccattttggattaatggctaaatcacgattaaaacgagtcttcaatgacatttacaaacaattagatagcatctatgacgatgaatacggtgaataatatgagtacagttaatcagccagaattaaaacagcctgaaaaggctgtttccagtgaagatattgataattttattgttgatgtattcaaggagacagggcataaaatatcaaaagatgatccagttatttcattaatttttctgaaccaaaagatacaggaaaaattcagcaatgagttacaagctaacttcacagccctgtctgagggcttcagacaggtcgtttcatctgtagaaaatgactatattcaaagattcaagaatattgttgagacgtgcggcgatctggataatgaaataaaagaaaaagtagaagagggaaaaaacgatctaaaagaaacaagtgttgaggtaaaagaaaaattaacagatgatattattgaactcatatctggaattaaacgcaaccaggaaaaaaacaacaaattatatgaagaaaagttgaagtcattatctaaggctgtaaaacccttcagtacaagaacagccattgcaatttgtgccttgtgcacattatgcctgtctgcggcattttctggcgcaacctggtatgttgcacaacatgaaaaagaggcaagcctgcgcttctatgcaagagcttttcttgatatgaaaaaaataactgaagagagcatgagaaaattaccaaaatcagaccagcaaaatataaaactcaaactagacgaaattgattcaagaaaaccatagatatgaaaaggagtcactaatgacaacttttaccgacgacgacaagaaactaattaaagaaatcagggagcgaatcggcagcctggacgtgcgagacaatattgagcgtcgggcttatgaaatttctctggcatcgctggaagcagagccagttatgttctgtatatcaggacaaaatgtagattcagaagaacatgtatcaaccagcaaagcggttgttgatgcctgggttgaagaatggaatcaggttgacggaagtcctggcgaaccactgtacaaaactatgccactctactgtcacgctgccttgccagcgccggtagtgcctgaaggactggttaaagcggtgcgtttttatgagcaggtaaaaaatgagaatccgccagttgggactggtgcgtggaaagacgctgttgactgggtgctcgaagaggcttgccaggctgtaaatacagacatcaaaggatgaacgatatggcaaccaacaatcgtaaagccaagatgctaatttcccgtgtatacagactttgctaccccagccagtggttgagagttagcaatcgccgtgtggtgttgttctcattttctggaattgccagagagggaatcaaagataagcgcagcgcggcgcaaaaccgctggaaaaacaacttgcgcactaaaggagcctaatatggctattgccgcaagttacaccatgcatctctactgtgattgtcgccagtgtacaaatggtaaatatcagtcgccagacttcggtgagtatatcggtacgtcatgggctggctgtgcaaaagaagcacgtaaagatggatggcgaataagcgccgacaaaacacgtgcttttgcgcccggacataaagttttgaggattaacaaatgacaacatttaccgacgacgacaagaaactaattaaagaaatcagggagcgaatcggcagcctggacgtgcgagacaatattgagcgccgggcttatgaaattgctctggcatcactggaagcagaagcgccaaatttgcctggtggtttcacaattgaagaagcaaaagaattacacgaaaatctggtaaaaagtcacgtaagcaaggctttaagtggcgaaaaaatgaaaaaagaaaatcgtgatgccgatttgcgctggattcatggcgtaatagttcaggccgcgtggtttgtgaaagcatcactagggcagaatgcatagtgcgtacctgcttttctcctggcaacggtggatcttccgcttcctcgtcactcgctcgctatgctcggtcgctggactgcggcgagcggttagctatcaaaaaaaatccccgcacaacgcggggatagttttatttatatgcaagttcatgacgtgccgcctgagccagaaaatggctacgatctttgtatacgccgccactttctctcacatatccatcaatacgacgaatcaatacatcaggcaatgaaatattaatacgttgttgtttgccctcaatttctgacaaatcaacatcaattacaaaccagctatcacagtggttataatttgggttggcggaataagtcaaacacccttcatcatgaatatcatcaacagaatgagcaccgcttattaccatctcttccacgattgctaatatcgcttcacgcgccattgcgggtatttctgcctgagaatcagcagcagaaacacatccaaaatcaaagcaatcaaaaaccggaacggtgataccgtatgctgtatgatcatctttcggtgtttcgacaccaacagaaaagaacatggctacctccaaagtcggcggggattaaatccccgccatttttttgatcgatctgacagtacctagcggcaagtcctttttaggatgaggaacaggaaaagtttttcctgttattggcgaccaccatatctggtgactgcttgccttatgccgtttcaactcgcaaccagcagctatcagttctttcaacaggtcagcagatttcatatgtcctccctaacctgaaaacaattatacacacgcatacacacaaaagcaaattatttcattcgtatgacttatgaaacacactgtaaagacagttcaatctttacagtgtaaatcatttatccagttttatcgctatgcatgtgatacatagaaaatcatatagtgttttactatatgatacctgattgacacttttaactgcacatctcatcatttacatcgtaaagacaaacatagctttacaatgtaaagctatataattaaacactccgtgtccctgataaggaaaaaaaatggctcaaccaaccccagaaaagatactggcaatcatagatgatcatgatcgcgcacaaaaaaaacaacgcaacaaaaacgtcttcatttatttatgtctctgcttggcaattattggagtggtcgcgcattcctttatatcaacgtttcgtcttgatggtgtagccgtccttacaattcttttgggcgtgtcagcaatcgcattttttctacattatgtagaatcagggaaaggccagattcttagcagtgaccgcatattgtccatactcgctcaaaccaaagattaccccacaattcgacgtaaagttgttaatcgcttgctctccggttcaaaactcacgggtaaagatgaagagtacatattcagtgaactgaaaaaggctgaacaaagcaacgaacgtgaaaagagattgcaagcaattaaagagtatacatcgtaatacaacgtaaagcatcacttgtaaatacaacacactacatcgtaataccagaaaacaccaacgccagcgagcaacaaaaaggggcgattaagcccctgcgcgatgattaatgacttctttttccagtgcctagctctggatcaagcctgacgttaaacacacctttaaagggcgcgtcaggctcctttccgtcctccacacaggactgtaaatacaaatcaaccgatgttttaaattcccgttccaggtcagctaatgtttctgcctcaaaagtcaccagatctcgaataaatgccagctttccatgcaggatattattttcaaaatccggctcaactgtacctaaatatcctttatattttaaatgtttcataaaaccccagcctctttcaagaaaagttatcagatagaagggtgaaagaaaataccagggagcagcgaggccacatacccctaagcgcagcgcaaccgccggaaaacgcaccacactgtaaagacaataaaatctttacaacgtaaagctaactatgtaatacaacgcgctacacattgacatcctccacgccctaaaggacgtggattcctacgacgttcaggctgtcgcctgaatcatttcggtgggttcctgcttcaacgagcggcctgactgcaccatctctccacaggcaagaacggcgtgccccgccgctaaaatgttacgagcgccatttacatcggcgttcgctgtatatccacatacctggcatctgaattgactttgtgacaggcgattttctttcgctgtatgaccacagcacgtgcaacgctggcttgtgtacgctggcggaacagcaagcacctgaccgccacgccagagctgcttgtactcaagctggcggcgcatttcataccagccctgatccagtatcgaacggtttaaacctgattttgcccggacattgcgccccggctggctgaccgtacccgctgctgactttgacatgttgctgaccttcaaatcctcaatgactatcattgcgtggtttttgctgacggtcgttgtgactttgtgaaggtagtccctgcggatatttgcgatacgggaatacagtcgctgtattttgcgtttctgcttctgccagttgttgctgaatttgaccttgcggcttaactgtcgctgaagtctcgccagcgtcttctggtttttctgaaaactgtttacaggatcaaaaatagtgccatctgacagcgtggcgagtttagccacgccagcatccagcccgaccattgatactgaagggtgaaccggagttgatacttcactttctgtctgaatactgatgtaccacttaccgcaggactgactgacagtgacatttttcacaacgcccgtgacctgacggctgttccggtagcgcatccagccaagtttcggcagaaaaatacgactgttttcctgatcgagcttaacgccctgcgggtagcggaatgcatcattctgtccccgctttttgaatcggggaaaagccgcccgcttctggaagaaatttttgtaggcccgctcaaggtctttcagtgactgctgcaatggctgtgatggggcatctttaagccattgggtttcagtggcatttttccactcaaccaaccacgaggccatccttgggtaaggaatatatttgttccctgcctcatggttctcattctgaagcgccagagcacgattgaaaacgaaacgacatgcgcctgcgaagcgcctcatttctcgctcctgttgaccaccgggtcttaactggaatttaaatgcctgtagtcgtttcattcgaccattttaaacaaaaaaagccaggtggaaaacctcgccttatatcctcgccctgaaggacggggttttacggcgcactggataagaaagggagagcattacactctccctatatatgactcaaactaaagcattatcccggttatgcgcccaccaaatgatttcgctaataatccatgcttctatcgcgggtgtttttacaggttccccatttacaatgcggtttgcaagctctatcatttcacatactgacatttgagaatctccaaagatgcatctgtcatttggtaacaggctgccccacagcctgttaccaaccccaaattagtatttgctgattactttaccctccttaatcatttttattagttcctgttcagaatattcttttccgtgttccaatgtggaatatatatcgccaatagtccatactccacactttttaatttctgcatttagccaggattcatgcagaataaacaacggttcgcaatcatttcctttttcataaacataaatagattcggtatcatttccagaatcagaagtaccaacgactttttctatatcgaaatgtttttttagaaaagttgtgaaatgcattttcatgctcctgccgctgagcggctttggtggttggggaccatcccctcccgatgtgtttataataggtcagaactgacctattatcaagtatttttccctccattcttcaaaaaaaacaccatcaaatacatatagttatattcatgtgatgcccgacagggcatggaaggggcgaaagaaaataccagggagcagcggggccacatcgccccgaagcgcggcgcagccgctgacgaacataccaggatgcacagggccatcccttcgccctgcaaagccagaacagaccaacaggccatgatcatgctgatttgcgccgcagaatgccgcagttagcgcgagcgacagcgagtttacgccgtcctggtgcattacagcagggcggggcgctgtactgcgcgtgtgagcgtcagcgagctacgggcgcaattgctcattgttcaatgcaactggggctattaagtccagccataaattcagttatggtttttgtagcttattccgtgatttcgtcatacgttaattctattttcatcttaatattccttaattacttccagaatcagaattctttttattccttttacaaagtacataatcagggtgttctccagctaaaagcagaagaaatttaaactctactggtgtaagtgctgtaccgcttgcagttccgacaggttcttctttgcgacgccaggtacgcggactcatgctaaatatttcggcacattctttctgtgtcaggccaattttttgccgcagacgtttaatgttttctggtgtgttttcatttggcattttttccctcactcatttcctgaatcatcatagaaacaatttctttatcattctctcttaatccgtcgctggcaaagtcgatagtgtcgaatgccttctcatgaaaaacaagatcggcaacagttttcaccgttgctttcgtttttcctaaagtcgcagacttagaaaaagtttttactcgcttcaccagatgaaacgtatcaccttctttattcagataatattgtctgtcaccttttcttatcttcatattgagatagtctccccttttaacagtaaaggggcatatagcccctttcttttaactttttccggtaatcaaatcgacatcttcctgataaagctccccaagaaccggaacaacgccttttttataatcacggatattatggcagtctgtaaaaatgacgacataagcctcgcctgttttttcatgtttaaggcaaattgtgcaaagcgtcacgcgcacaacagaaaacacatgaccagttgtagagacgatagcaggaaaagtagattgtttcatgtttaactcctgccgctgagcggctttggcgattgggggccatcccctctcaatgcattaataataggtcacaaatgacctattatcaagtattttctagacgagctttattgaaaaatcattttcaataaattcatctaacatctttaatataccagctttatttacgaaatcatcctccataatttcgatacttgctgatatttcacatgtaaactcaatgctcctgtcaaatcccgcaatcccagctaatgcagacagcatatgataattatcaatatttatattaccaataagaactttcatttatcctcctgatatggggggaatccccccatattaaaaattacaatctggttgcaagtccggtttgttcattaaataaacattcaagctgatcacaataaatattatcaaattttgatatttcttttactgtagctccacggacacgggaaaatgtcaccaggtatgtatcagagaaggttaatttgattttaaccaaattaattcccttcattgcaaaatttgaaggtaaacgaaagcaaagaccagactcaccattttcatcaaaacaggcaaagttctttgcgcctgtcatagcaataaagcggtttccaccaagctgattaagaatttcagtagcaacaaatttggcgtggttttccatttttaagctcctgccgctgagcggctttggtgattggggaccatcccctctcgatgtgtttataataggtcagaactgacctattatcaagtattttttcctcctttctttaaaataaatatcgttaaatacaaatatttacattcatgcaatgcccggcagggcatagaaggggcgaaagaaaataccagggagcagcggggccacatcgccccgaagcgcggcgcagccgctgacgaacataccaggatgcacagggccatcccttcgccctgcaaagccaggacagaccaacaggccatgataatgctgatttgcgccgcagaatgccgcagttagcgcgagcgccagcgagtttacgccgtcctggtgcattgcagcagggcggggcgctgtactgcgcgtgtgagcgtcagcgagctacgggcgcaacattacattgctgcattcgcctggcattctccacgccttgaaggacggagttttactgcgcaccagataaaaaaaggggcgattaagcccctgtattcactattaacaatttaacatggttgcaggggataccccctgcaactattttcttagtagtatgatgtgaactcgtgtttttcttccggtgatcctttatatgctgtttcgaatgactcaatttcaattgctggcgtactgtaataatcacgcactcgccgttttaatggctcaccacagaaatcattgagtaatggggtcttatatccgctcattgaatgagtccgatgaactgaagcgcgaatctcctggacagttacggtttttttgccatgaacagaaataacctgatagaaattaacgttcgtttgctcatatccccaggaagatacaaacacatcgccaacagaaacagtgccgttattaaaagttaatgttttcatttttatctcctgccgctgagcggctttggtggttggggaccatcccctcccgatgtgtttataataggtcagaactgacctattatcaagtatttttccctccattcttcaaaaaaacaccatcaaatacatatagttacattcatgtgatgcccgacagggcatggaaggggcgaaagaaaataccagggagcagcggggccacatcgccccgaagcgcggcgcagccgctgacgaacataccaggatgcacagggccatcccttcaccctgcaaagcccaacggactgacaggccatgatcatgctgatttgcgccgcagaatgccgcagttagcgcgagcgccagcgagtttacgccgtcctggtgcattgcagcagggcggggcgctgtactgcgcgtgtgagcgtcagcgagctacgggcgcaacaacacaccaggcaaaatcgcatcctgaaaagttaccctgtaacatacacacaatgtaaagcgcaaaaaacaattacattgtaaagacacaaacatctttacaacgtaactataatgaatacaatgtaaagacaaataaacctttacactgtatatccgaggtttctatggggagagcattacttgtcgcatcagataaaggcggtgtaggaaaaagcaccacagcaacaaacctggcttcttatctggtaaataattcacgaacggtcatcattctgaagaccgataaaaacaatgatattcttagctggaacgaaaaaagaaagcagaatggcttattaccggttcctgtttatgaagagtatggcgatgtatcagaagtcattaagcgcctgaaaaaaatatgtgaagtgctgatcattgactgtccagggcatgacagcaaggaatttcgcagtgccttaactgtagctgacattctgcttactctcgttaagccgtcttcagatttcgaagcagaaacgctgactcatgtaacagaaaaagttcgcacagctcaacagatcaatccagacctgcaaccctgggtacttttcacgagaattaacacgacaaaaccacgccacagaaaagcagcgattgatctcgacaagttactccgggagaacccggtgtggatacagccacttcgtacacgtatttcagatttagatatttttgaagcggcctgtaatgaaggcgctggcgttcatgatgtacgtcgcgcatccagcctttctacagctaaagcacaaatagagcttttggcgcaagagttaggcatcaatccctaatggatgtaatacgacagctttacatcattagctttacacagtaaagctaatgtaatacacgaaaggtgatataatggctcttgacttgaaaactccggtaataccaggacaaaaaacagaacaaaccaatgcagacacagcccgattcatcaatgaagctacccgcaaaaaatcgggagcaactaaagtgaccaatgtccggcttggggacgtttacgaagatattctggaacgggaagcactgcgaacaggccagacaaaaacagcaataatgaaagcggctcttgcagcttacgaacacggcctggacgaaaacggaaaaaatcactggattctacagtcagccaggctgaaatgataaagcccttcggggctttatcccttacgttttaattgtttcttctcgctggctttcttacgggcatcgagaaccagttgcgcataagttgcgtgtgctttttttactgtaccagcaggtttcccgtaaaggtcgtaacgtgttgcgcctggtacagtacaattctgaagatattgccaccggaacgtcatcacctgaaccgcacaattccactcttcaatcgtcagatccacatccgggttatccgccaggtatttctcaacgtcctggagaatcccgcttttcaggggcaagttctttttttcgtctgtccatagttcaggaaaaacagcacgaactttattgaaacacttttcaaaatattctttcggatattttgggggaaaagtgatttgttttttcaaataccagggctgaggctgctttttatgtgttttctctgctacagcatctttcttctgtactttcttgttttcattaactgctgatttttgtacttcctgcggcttttcattcaccacaggattttctggcatgaccagaacgcggcgttttttgaccacaatcacgggtgttttttttggctgcatactcgcctcaataattgctgtcatattgactaattataccattttcagcagttaatatcctgaaaatacatggaaaagggggtatccgtacagaataccccctttgcaaaggcgcttaatgccagaaccacatcatccccaaaaaggcgggctttcgcccgcctccgggttgctacttaccgttggattcgtaagccagacttgccgtaacctccctgtttccatctttcagccggacctcgcacaaacgattccgggtcagatacgtgaatattaacaatgtgcagcacacgattaataaacaccaggtcagggcgtttttcggctgtttcatggccttcttctccttgcgtaacgcgcggtaagaggctatcctgatgttgttgaagcattgggatcgcctcgtgggtgtactgaccccaaaaagttggacagttaaacacgaggcatataggtctgattccgatattcaattggagtcagaccttttaatttcaggctaattcttctgctgttgtagtattcaatatattccgtaacagcatccttcagttcgcttatattactgaactcatcaagataaaaacactccgactttaaggttccaaagaaacactccaccacagcattatccagacaattgccttttctggacatgctttgtttaataccatgttctttaaggatattttgatatcttctcatacgatactgccatccctggtcagagtgcagaacaggatgctcgtgaggattaagctttttgaatgcctgatcgagcatattctcaaccatgttcatcactggtctttccgaaaggctgtaagaaataacttcgttgttgaagagatctattactggagacaaatacagcttgcgcccattgactgcaaattcagtaacatcggtaacccacttctcgtttggccgcgtagccttgaaatctctttggagaacattaggggcggtttgccctacctctcctctgtaagagcggtatcgcttgaccttaatcgctgctttaagtgagagggttcccatcaggcgctgaacagctttatggttaatctgtttcccttctcgatgaagagacagcgttaccctacggtatccgtatcggcctctattctcgtgataaatctcactaatacgctttttaacgtccgcatacttgtcaggcttgctgagagcctttagatgataataaaacgtactgcgcggtatctccgcagccctgagaagctcatcaagaggataaaactgccttagctcgttgagtactttcactttttcgtgggatgagctaaggctttcagcttttttagatacataagccgcgtttcaagaaatcgaacttgcctttcaagatcctcaatgcgtcggtcttttgacagctccaatgctgatgccgctttttctggatcaactgatattgcaatgtttcttttggtgccaatcttgagcgcgcgtaaaccagcttctccgcgctcttcatagaccttcagccacctggctacagaaccactaccagcaagcataaagtgagcagcagcctgattaagggacatgtgctgctcgatcacagctttcacgaccttaatacgcaactctggatcagcactaacgcctttaggtttgggaattaaacctttttctccatgtttttcatagagggcaacccatgtcctgacctgggttcgggggacaccaaaacgtgccgagatgatcctgtaaccatcatcagttgtgaagtagtgattcacgacttcaaggcgcttttcaaaagggtattttggctttgacatattaggggctattccatttcatcgtccaacaaaatgggtgcagtacatgggttaatgaaaaattaactacggggctttcttctttctgccgcacaacaagcatcagcagcagttccaggcttccggcaaggcgatcaacgacaaggtgcggatgtatgggcgcatcggtcaagcgttgattgaggccaagcaaagcggcagcgatccgttcgccgccatcgaggccgttatgccctgggacaccttcgccgccagcgtcaccgaagcgcaaacattggcgcggcctgccgactttgatttcctgcaccacatcggtgaaagctatgccacgctacgccgctacgcgccgcagttcctgggcgtgctcaaattgcgggctgcgcccgccgccaagggtgtgctcgatgccatcgacatgctgcgcggcatgaacagcgacagcgcgcgcaaggtgcccgccgatgcgccaaccgcattcattaaagactaactaccatggtccatatgaatatcctccgtcggggtttgtaccgtacaccactgagaccgcggtggttgaccagacaaaccacgactcagtcacctcctagctgactcaaatcaatgcgtgtttcataaagaccagtgatggattgatggataagagtggcatctaaaacttcttttgtagacgtatatcgtttacgatcaattgttgtatcaaaatatttaaaagcagcgggagctccaagattcgtcaacgtaaataaatgaataatattttctgcttgttcacgtattggtttgtctctatgtttgttatatgcactaagaactttatctaaattggcatctgctaaaataacacgcttagaaaattcactgatttgctcaataatctcatctaaataatgcttatgctgctccacaaacaattgtttttgttcgttatcttctggactacccttcaacttttcataatgactagctaaatataaaaaattcacatatttgcttggcagagccagctcatttcctttttgtaattctccggcactagccagcatccgtttacgaccgttttctaactcaaaaagactatatttaggtagtttaatgattaagtcttttttaacttccttatatcctttagcttctaaaaagtcaatcggatttttttcaaaggaacttctttccataattgtgatccctagtaactctttaacggattttaacttcttcgatttccctttttccaccttagcaaccactaggactgaataagctaccgttggactatcaaaaccaccatatttttttggatcccagtcttttttacgagcaataagcttgtccgaatttctttttggtaaaattgactccttggagaatccgcctgtctgtacttctgttttcttgacaatattgacttggggcatggacaatactttgcgcactgtggcaaaatctcgccctttatcccagacaatttctccagtttccccattagtttcgattagagggcgtttgcgaatctctccatttgcaagtgtaatttctgttttgaagaagttcatgatattagagtaaaagaaatattttgcggttgctttgcctatttcttgctcagacttagcaatcattttacgaacatcataaactttataatcaccatagacaaactccgattcaagttttggatatttcttaatcaaagcagttccaacgacggcatttagatacgcatcatgggcatgatggtaattgttaatctcacgtactttatagaattggaaatcttttcggaagtcagaaactaatttagattttaaggtaatcactttaacctctcgaataagtttatcattttcatcgtatttagtattcatgcgactatccaaaatttgtgccacatgcttagtgatttggcgagtttcaaccaattggcgtttgataaaaccagctttatcaagttcactcaaacctccacgttcagctttcgttaaattatcaaacttacgttgagtgattaacttggcgtttagaagttgtctccaatagtttttcatctttttgactacttcttcacttggaacgttatccgatttaccacgatttttatcagaacgcgttaagaccttattgtctattgaatcgtctttaaggaaactttgtggaacaatgtgatcgacatcataatcacttaaacgattaatatctaattcttggtccacatacatgtctcttccattttggagataatagagatagagcttttcattttgcaattgagtattttcaacaggatgctctttaagaatctgacttcctaattctttgataccttcttcgattcgtttcatacgctctcgcgaatttttctggcccttttgagttgtctgattttcacgtgccatttcaataacgatattttctggcttatgccgccccattactttgaccaattcatcaacaacttttacagtctgtaaaataccttttttaatagcagggctaccagctaaatttgcaatatgttcatgtaaactatcgccttgtccagacacttgtgctttttgaatgtcttctttaaatgtcaaactatcatcatggatcagctgcataaaattgcgattggcaaaaccatctgatttcaaaaaatctaatattgttttgccagattgcttatccctaataccattaatcaattttcgagacaaacgtccccaaccagtataacggcgacgtttaagctgtttcatcaccttatcatcaaagaggtgagcatatgttttaagtctttcctcaatcatctccctatcttcaaataaggtcaatgttaaaacaatatcctctaagatatcttcattttcttcattatccaaaaaatctttatctttaataatttttagcaaatcatggtaggtacctaatgaagcattaaatctatcttcaactcctgaaatttcaacactatcaaaacattctatttttttgaaataatcttcttttaattgcttaacggttacttttcgatttgttttgaagagtaaatcaacaatggctttcttctgttcacctgaaagaaatgctggttttcgcattccttcagtaacatatttgacctttgtcaattcgttataaaccgtaaaatactcataaagcaaactatgttttggtagtactttttcatttggaagatttttatcaaagtttgtcatgcgttcaataaatgattgagctgaagcacctttatcgacaacttcttcaaaattccatggggtaattgtttcttcagacttccgagtcatccatgcaaaacgactattgccacgcgccaatggaccaacataataaggaattcgaaaagtcaagattttttcaatcttctcacgattgtcttttaaaaatggataaaagtcttcttgtcttctcaaaatagcatgcagctcacccaagtgaatttgatggggaatagagccgttgtcaaaggtccgttgcttgcgcagcaaatcttcacgatttagtttcaccaataattcctcagtaccatccattttttctaaaattggtttgataaatttataaaattcttcttggctagctcccccatcaatataacctgcatatccgttttttgattgatcaaaaaagatttctttatacttttctggaagttgttgtcgaactaaagcttttaaaagagtcaagtcttgatgatgttcatcgtagcgtttaatcattgaagctgataggggagccttagttatttcagtatttactcttaggatatctgaaagtaaaatagcatctgataaattcttagctgccaaaaacaaatcagcatattgatctccaatttgcgccaataaattatctaaatcatcatcgtaagtatcttttgaaagctgtaatttagcatcttctgccaaatcaaaatttgatttaaaattaggggtcaaacccaatgacaaagcaatgagattcccaaataagccatttttcttctcaccggggagctgagcaatgagattttctaatcgtcttgatttactcaatcgtgcagaaagaatcgctttagcatctactccacttgcgttaatagggttttcttcaaataattgattgtaggtttgtaccaactggataaatagtttgtccacatcactattatcaggatttaaatctccctcaatcaaaaaatgaccacgaaacttaatcatatgcgctaaggccaaatagattaagcgcaaatccgctttatcagtagaatctaccaatttttttcgcagatgatagatagttggatatttctcatgataagcaacttcatctactatatttccaaaaataggatgacgttcatgcttcttgtcttcttccaccaaaaaagactcttcaagtcgatgaaagaaactatcatctactttcgccatctcatttgaaaaaatctcctgtagataacaaatacgattcttccgacgtgtataccttctacgagctgtccgtttgagacgagtcgcttccgctgtctctccactgtcaaataaaagagcccctataagattttttttgatactgtggcggtctgtatttcccagaaccttgaactttttagacggaaccttatattcatcagtgatcaccgcccatccgacgctatttgtgccgatatctaagcctattgagtatttcttatccatttttgcctcctaaaataaaaagtttaaattaaatccataatgagtttgatgatttcaataatagttttaatgacctccgaaattagtttaatatgctttaatttttctttttcaaaatatctcttcaaaaaatattacccaatacttaataataaatagattataacacaaaattcttttaaaaagtagtttattttgttatcattctatagtattaagtattgttttatggctgataaaagcgcttttgaagctggggtgggcgaagaactccagcatgagatccccgcgctggaggatcatccagccggcgtcccggaaaacgattccgaagcccaacctttcatagaaggcggcggtggaatcgaaatctcgtgatggcaggttgggcgtcgcttggtcggtcatttcgaaccccagagtcccgctcagaagaactcgtcaagaaggcgatagaaggcgatgcgctgcgaatcgggagcggcgataccgtaaagcacgaggaagcggtcagcccattcgccgccaagctcttcagcaatatcacgggtagccaacgctatgtcctgatagcggtccgccacacccagccggccacagtcgatgaatccagaaaagcggccattttccaccatgatattcggcaagcaggcatcgccatgggtcacgacgagatcctcgccgtcgggcatgcgcgccttgagcctggcgaacagttcggctggcgcgagcccctgatgctcttcgtccagatcatcctgatcgacaagaccggcttccatccgagtacgtgctcgctcgatgcgatgtttcgcttggtggtcgaatgggcaggtagccggatcaagcgtatgcagccgccgcattgcatcagccatgatggatactttctcggcaggagcaaggtgagatgacaggagatcctgccccggcacttcgcccaatagcagccagtcccttcccgcttcagtgacaacgtcgagcacagctgcgcaaggaacgcccgtcgtggccagccacgatagccgcgctgcctcgtcctgcagttcattcagggcaccggacaggtcggtcttgacaaaaagaaccgggcgcccctgcgctgacagccggaacacggcggcatcagagcagccgattgtctgttgtgcccagtcatagccgaatagcctctccacccaagcggccggagaacctgcgtgcaatccatcttgttcaatcatgcgaaacgatcctcatcctgtctcttgatcagatcttgatcccctgcgccatcagatccttggcggcaagaaagccatccagtttactttgcagggcttcccaaccttaccagagggcgccccagctggcaattccggttcgcttgctgtccataaaaccgcccagtctagctatcgccatgtaagcccactgcaagctacctgctttctctttgcgcttgcgttttcccttgtccagatagcccagtagctgacattcatccggggtcagcaccgtcggaaaagtggccatcatttgacgaactacagcccgggttcagcacactgagacttgtaaaaaaaaaccccgcgcggggttttttttttaaaagcaccgactcggtgccactttttcaagttgataacggactagccttattttaacttgctatttctagctctaaaactattggccacgtttaaatcagaatctattatacagaaaaattttcctgaaagcaaataaattttttatgagacagtcattcatctttctgcccaaccgagtgaccaagagaggatgaagcatttgccgagtagttcagcacactgagacttgtaaaaaaaaaccccgcgcggggttttttttttaaaagcaccgactcggtgccactttttcaagttgataacggactagccttattttaacttgctatttctagctctaaaacagggattggctgagacgaaagaatctattatacagaaaaattttcctgaaagcaaataaattttttatgagacagtcattcatctttctgccctttcgggacattcaggagattttcgccggacgtacgcattttcagcacactgagacttgtaaaaaaaaaccccgcgcggggttttttttttaaaagcaccgactcggtgccactttttcaagttgataacggactagccttattttaacttgctatttctagctctaaaactaacacgccacatcttgcgagaatctattatacagaaaaattttcctgaaagcaaataaattttttatgagacagtcattcatctttctgcccctccaaaagcaaaaacccgccgaagcgggtttttacgtaaatcaggtgaaactgaccgacctgttaccaatgcttaatcagtgcacgaagttcctatactttctagagaataggaacttcggaataggaacttcggctgaaagcgctatttcttccagaattgccatgattttttccccacgggaggcgtcactggctcccgtgttgtcggcagctttgattcgataagcagcatcgcctgtttcaggctgtctatgtgtgactgttgagctgtaacaagttgtctcaggtgttcaatttcatgttctagttgctttgttttactggtttcacctgttctattaggtgttacatgctgttcatctgttacattgtcgatctgttcatggtgaacagctttaaatgcaccaaaaactcgtaaaagctctgatgtatctatcttttttacaccgttttcatctgtgcatatggacagttttccctttgatatgtaacggtgaacagttgttctacttttgtttgttagtcttgatgcttcactgatagatacaagagccataagaacctcagatccttccgtatttagccagtatgttctctagtgtggttcgttgtttttgcgtgagccatgagaacgaaccattgagatcatacttactttgcatgtcactcaaaaattttgcctcaaaactggtgagctgaatttttgcagttaaagcatcgtgtagtgtttttcttagtccgttatgtaggtaggaatctgatgtaatggttgttggtattttgtcaccattcatttttatctggttgttctcaagttcggttacgagatccatttgtctatctagttcaacttggaaaatcaacgtatcagtcgggcggcctcgcttatcaaccaccaatttcatattgctgtaagtgtttaaatctttacttattggtttcaaaacccattggttaagccttttaaactcatggtagttattttcaagcattaacatgaacttaaattcatcaaggctaatctctatatttgccttgtgagttttcttttgtgttagttcttttaataaccactcataaatcctcatagagtatttgttttcaaaagacttaacatgttccagattatattttatgaatttttttaactggaaaagataaggcaatatctcttcactaaaaactaattctaatttttcgcttgagaacttggcatagtttgtccactggaaaatctcaaagcctttaaccaaaggattcctgatttccacagttctcgtcatcagctctctggttgctttagctaatacaccataagcattttccctactgatgttcatcatctgaacgtattggttataagtgaacgataccgtccgttctttccttgtagggttttcaatcgtggggttgagtagtgccacacagcataaaattagcttggtttcatgctccgttaagtcatagcgactaatcgctagttcatttgctttgaaaacaactaattcagacatacatctcaattggtctaggtgattttaatcactataccaattgagatgggctagtcaatgataattactagtccttttcctttgagttgtgggtatctgtaaattctgctagacctttgctggaaaacttgtaaattctgctagaccctctgtaaattccgctagacctttgtgtgttttttttgtttatattcaagtggttataatttatagaataaagaaagaataaaaaaagataaaaagaatagatcccagccctgtgtataactcactactttagtcagttccgcagtattacaaaaggatgtcgcaaacgctgtttgctcctctacaaaacagaccttaaaaccctaaaggcttaagtagcaccctcgcaagctcgggcaaatcgctgaatattccttttgtctccgaccatcaggcacctgagtcgctgtctttttcgtgacattcagttcgctgcgctcacggctctggcagtgaatgggggtaaatggcactacaggcgccttttatggattcatgcaaggaaactacccataatacaagaaaagcccgtcacgggcttctcagggcgttttatggcgggtctgctatgtggtgctatctgactttttgctgttcagcagttcctgccctctgattttccagtctgaccacttcggattatcccgtgacaggtcattcagactggctaatgcacccagtaaggcagcggtatcatcaacaggcttacccgtcttactgtcggcccggatgatcctgacgacggagaccgccgtcgtcgacaagccggccgactaggtcgacgcttggattctcaccaataaaaaacgcccggcggcaaccgagcgttctgaacaaatccagatggagttctgaggtcattactggatctatcaacaggagtccaagcgagctcaaaaattaaaaatgaagttttggaggcctcatttggtgacgaaataactaagcacttgtctcctgtttactcccctgagcttgaggggtcaacatgaaggtcattgatagcaggataataatacagtaaaacgctaaaccaataatccaaatccagccatcccaaattggtagtgaatgattataaataacagtaaacagtaatgggccaataacaccggttgcattggtaaggctcaccaataatccctgtaaagcaccttgctcatgactctttgtttggatagacatcactccctgtaatgcaggtaaagcgatcccaccaccagccaataaaattaaaacagggaaatctaaccaaccttcagatataaacgctaaaaaggcaaatgcactactatctgcaataaattcgagcagtactgccgttttttcgccccatttagtggctattcttcctgccacaaaggcttggaatactgagtgtaaaagaccaagacccgctaatgaaaagccaaccatcatgctattccatccaaaacgattttcggtaaatagcacccacaccgttgcgggaatttggcctatcaattgcgctgaaaaataaataatcaacaaaatgggcatcgttttaaataaagtgatgtacaccgaatttgattgcgtctcaacccctacttcggtatctgtattatcacgtgtatttttggtttcacggaaccaaaacataaccacaaggaaagtgacaatatttagcaacgcagcgataaaaaagggactatgcggtgaaatctctcctgcaaaaccaccaataataggccccgctattaaaccaagcccaaaacttgcccctaaccaaccgaaccacttcacgcgttgagaagctgaggtggtatcggcaatgaccgatgccgcgacagccccagtagctcctgtgatccctgaaagcaaacggcctaaatacagcatccaaagcgcacttgaaaaagccagcaataagtaatccagcgatgcgcctattaatgacaacaacagcactgggcgccgaccaaatcggtcagacatttttccaagccaaggagcaaagataacctgcattaacgcataaagtgcaagcaatacgccaaagtggttagcgatatcttccgaagcaataaattcacgtaataacgttggcaagactggcatgataaggccaatccccatggcatcgagtaacgtaattaccaatgcgatctttgtcgaactattcatttcacttttctctatcactgatagggagtgggaaaataactctatcaatgatagggtgtcaaatcgatgcacaacgtgcgttacatatcaaagggaaaactgtccatacccatggataacgggcgtataacacgcccgttgttttatgatgatgtaaaatcttccccaaaactttccccaaaacccttccccaaaactggctatgaagttcctatactttctagagaataggaacttcggaataggaacttcttttgcggccgcaagatccgctcatctgtaacatcattggcaacgctacctttgccatgtttcagaaacaactctggcgcatcgggcttcccatacaatcgatagattgtcgcacctgattgcccgacattatcgcgagcccatttatacccatataaatcagcatccaggttggaatttaatcgctgcctcgagcaagacgtttcccgttgaatatggctcataacaccccttgtattactgtttatgtaagcagacagttttattgttcatgatgatatatttttatcttgtgcaatgtaacatcagagattttgagacacaacgtggttcccgccatatgaaaatccggccagaccaacatcattctggcgctccgaaagaagggatattcgccgccgtgaccagcctggagcgggtcgcataatctttggccgcttcgtagtcgaggaacatggcatgaaccacggcagcctggcggctgcaaattgaaaaccgccccggttcgtcctgttgttgccgcacgccccgcagaatatgtatgctctgaggacctgttttattaaggactcatccccttatgttgacccgcaaaagtatcgatacagttctgctctctgttggtgctgagaagctctcacaacgagaatgggactggatgaaaatgctcaaacccatggacccaccacctgcgatggtgacgacctccatcctgaagcgccgtggcgatacagcagcccttaccctgctacaggataccggggtttaatccatcctcatgttgtccggttttactccccgccctctgaaacgtctgttcacagccaaccagtgctggacgtccttcctggatgcgggcggtctgcgcgatatcgaggttgaagccgtcaccaaaatgctggcctgcggcacacggatactgggtgtaaaagagttcgggtgtgataacccggactgtcagcacgtaaagtacctgaccaactcatgcggcagccgtgcctgcccgtcctgcggaaagaaggccacagacctgtggacagcaacacagctgaatcgtcttcctgactgcgactgggtacatctggtcttcaccctgccggacacgctgtggccggtgttcgaaagcaaccgctggctgctgaatgacgtgtgccgtctggcggtggagaatctgctgtatgccgcccgaaaacgggggctggaacccggtatcttctgcgccatccacacgtatggccgtcgtctcaactggcatccgcatgtacatgtgtctgtaacctgtggaggtctgaataagcatggtcagtggaaaaagctgagcttcctgaaagacgcgatgcgttcacggtggatgtggaatatgcggcagctgcttctgaaagcgtggtcagaggggatggcaatgccggagtcgttgtcacatatcacgacggaatcacagtggagaagcctggtgctgaaatccggcggaaaatactggcatgtgtacatgtcgaagaagacagccggagggcggaatacggcacgctacctgggtcgttatctgaagaagccaccaatagcggcttcccgactggctcattacaacggaggggcaagcctgagcttccgttacctggaccacaaaacgggagaaacggcgacggaaacgctgacacagcgtgagctggtcgcgaggctgaaacagcacatcccggagaagttttttaagatggtgaggtacttcgggttccttgccaaccgtgtgtgtggagagaagctgccgcaggtgtaccgtgcactggggatggataaaccggaaccagtggcgaaagtgtgctatgcacaaatggtgaaacagttcctgagtcgtgacccgttcgaatgcgtgctgtgtggctgccggatggtataccgccgggccattgcggggctgaatgtatcagggctgaagaaaaacgcgcgggatatcagtctactgaggtatatgccggcctgacacaggctaagtgtgcccgggaatcggtgaaagtataaaaaacagcctgttacggtataaaaatcgaccatacagagagggaaaccaccggagtggtgggaaaagcagaaaggctcacgtggcataaggcgtggacaatggtatcgactggtttttcaatttcctatacgtcaagatacaaaccaccttttcgccatgaggcagaaagcctcaagcgccaacagcattatatattgaccaggaattaaattcccagctttcggcgtggactatacagtgtgtgattcaccacgatgaatcctttgttgatccactgtgtgacctgcgcaggttgaactccggtcagcctggcgaacgatgcctgattcccccgatagaacttgttgatgtattcaatcaaaggcattttttaattctccgaaacaacgcaaaatcatatagtaatttactatatgatttttattccgcaagtgattaactcatcggatttctttgtagttaacgaaacgttaaatttagtttgtgcctggaatggcacgcaagaagcacactagcattatcattttgatcaaaacgctatttccccccgttattggggggctttctttttgatgccgcgccagcggcatgtaaggcggcactctgttgttttatatggcacagagctaaaccgccgaagcccggcgtaagccggtactgattgataggtttcaccttacccatccccatcctgctaagccatacccgctttcagccatgaaatagcttttgtgcgcggtcggagtggtcccgacaagggtttacccgcagtcggggcgtatctccgcgttagcggaccgtcagggccgcttacgagcgtgtatttggtacttccagccagaaggctgacagcgatgagatttcttagttacaacatccattattgaaagcgatgttgttcccgccctttgggcgggggcggcggcgcttttcagtgatgggttgggcactgtggctgagtatttgcagcgtttttttgtaggagggttggaggggctttgtttttcattaggcagaagtccatatgcccgccgcgaagcggtgggaggtacttttatattctgagcggcgcggcgttagccgctgcaagcgaaggcatttttgtgattatccacagttgtttcaaagataaatattttccctgcggcgaagcaacgcaggggattaaagaacaggggttaagaatatattgcgggtttgatgttctatgtttgctgctttctgaagttattcctttgcgggtttttgtggataaccgaaggcgtttttactccgataccctattgcggccatcaaaaaactgtcagagcgggacaaaatgaaaaacggtcgtcaaatatgaggaatttcatgaaatgcaggcaacacgaaaagccccgaaggggctgaagagagtgccgattgtatcaggcagctaaactagtggggtggcgaagctgtcagagccagttcaagctgacgtagatctctggctaccagttgctctaatctttctttagtgcaccagtacgcttcgtccggcggcatacgcttcagaataaaccgcgcaatttcgtttcgctgttcatcatacggcagttttgccaggcgattagcacgtttgcgctccgctgctttcttacgtcgggacttgatggcatcgagagaacgctgcgcataccagcgtttacgagccgagtgaacagagatttcttcgccctcgcggataacgccttctttaatcaattgcagacggatttcactttctgcaaggcgcttacgttgctgctcctgaagtttcaccagatcaactcccagcattttccagccagtttcggtgatccagacgtatttcggcagtcgctggcgggattcacgatcccatatcgtcttttctgacgttcccaacgtgccaaaggaaacctgctctgccagcagacgggaaaggcgcgatactgtgactgcggtttcaggaatcacgtctcccttactgtcttttgggcttatttcttctgccaggcgggagacagacatgccgacagtgtgcaatccacgatcacaaaaactcacaagtacaacccatattgcgtcaagcagccgctgtttctccggtcggaatttatatttgcgaccgacactctgacgtttcagtacataaaatggatgcaacgacatgtgcattctgagtgtgttctgaccagtgaccgggtcttttttaacgagacgattgtaagcgtggcccaactgtccgcccagcgccttatagttgtcgggacggaaccaggctggattctcacactttggcttagtggaatgttcaccccggcgacgttttgttgttccgcctttgttttcctgggggaccaggaatgagctttcaattcccgcttcgtagtcctgccagaaacggatctgctcttccggtgatagttcagaccagtgacgtttgctaatcacagcaagctgcacttagcttgcactgtaagagttgatatttccttctcatggaattaaactccacttcaggtaacaagcatacctgaaataaataagctcaaggctctgccttgatgtcagcccccgctaatcttcgctgcctggaaaacacgagattacgggggttttctttatctgaaatttacgttcttgaacaaaatttcagcacctcgttttctgcatttacaaatcgcggaaaacttgcctgcaaatttagcagcatgggcgcaatcgatcaacgatgttcaagcctggctcgtttcctttttgattcagcacacatctctgacagcttcaaaatcgttttcagaacagctactgaagccccttctttactgacgttccccatacaaaaccttacaaaatcagaaattcagaattttgtatattcaaaaaagtttttttgactgcatacacccactcacacgatcgaataaaccacacaaacagtattatctagatttttagatcgtacatcatttaacaaacagaatattattctgctttttagatgttatctagatcattagatcgctcacgcggcattgacaggttttaaatgtcgcacacacaatactatccagatgattgtaaaaagctcgttcatcgcgttttttgtgctcattgcctggaaaatgagcactctttgacgcccgttagaacgcttgtcatctcatgctctttaacaaccccggacagcggtcattgcctaaagccctggcataaggaggttattattcgtgcatttcaagcaccgctggcatctgtcagcaacgggctacgtaacagagtgacgtgccgcgccatctacacaggtaacgactctttatccgcaaatatcattctgcatacttaaacccccttatttggtgaactcgcgttgagttaatctcactcactctctccctgagcaagtcgtacaggctgcaacgcagaagtacaccagatttgccagtctccactccaggtaagggggtttagctatgcatgatgatgaacaatcagataaagagcctgtagtgagtggctgcaacttttcataattagcttatgacgctgtattccggggatgtttctatttcagacaaacaaccgggagaaaatatggcgcgtaagttaaaaattaatcctgtcattcctgaatgtgtggcagatttgaaaggatatccactctatatcatcgttgcttattggggattaagaaataataaaacgctcacaacaacggatgttagccgtaatttccttattacacagcaacaatcttatgatgtgcttacctacatttaccaggaagcacagaagcagataacagcaactaaacgaacactatttaacgagcacaaaagaagaattagtgcgttcaggattcttgatattgacaaaggcatattgcgcaccccaaaaaaagagattgcatatgccagctacgacaatataccaactgtaacaatgaaaagtacccgttgtgagatccaagatagttttacagaactgcgccgctggatgtgttcaagaaagacaggtgatcgagtggaggtatttttgaatgtctaagtaccaaataaacgcaaccatcaaaaaaccaggtggtggccccgtgaaatggactcattacagcgacttccctatgaccgctgaagaatgcagaaaaaacttctcaaaagaaaaagaagcaggaaagtgtttttctgttgatgttcatatttcagatttcatttgcaaagaaatacatccactgtgatgaatggggagaggattaatcatgattgacgctataattacgccaatagttacatctattccgttactcttattaattttagttgcgctgatattcgttaaatctgccgtcaaaatcgtgccacaaggtaatgcctggacagtggaacgctttggtaaatatacccatacgctttcccccggtcttcacttcctgatcccggttatggaccgcataggtcaacggatcaacatgatggaaaccgtcctggatattcctaaacaggaagttatttcgaaagacaatgcaaacgtaactatcgatgctgtttgttttgtccaggtcattgatgcagcgaaggcagcttatgaagtcgataatcttgcatcagctatttcaaatcttgttatgaccaatatccgaactgtcgttggtggaatgaatctcgacgatatgctttctcaacgtgacagcatcaattctaaactgttaacggttgtcgattatgcgactgacccgtggggaattaaggtcacacgtattgaaattcgggatgttaaaccaccaaaagaactgactgaagcgatgaacgcgcaaatgaaagcggaacgaactaagcgtgcccggattcttgaagcggaaggtatccgccagtcagaaattctgaaggcagaaggggaaaaacagtctcaaatactgaaagcggaaggggaacggcaatcagcatttcttcagtccgaagcacgcgaacgtcaggcagaagcggaagctcgcgcaacaaaactggtgtcggatgcaatcgctgaaggtgatgttcagtctgttaattactttattgcgcagaaatacactgaagcactccaggcaattggcacagcatcaaacagtaaactggtgatgatgccgcttgattcaagtagcctggtgagttcggttgcaggtatcagtgaactgctaaaaaacgtatcacaggatactcccaaagttgatatgaaacaggctcaacaatatttgtcttaaaacagatagcggacggtgacaatattgttttaatcaccgtccttatattcatattcacgaatgagcaaatcattaaaatgaaaacttatgggttcatccttcttattttacatataatccctatgggggcatggttctttcttctttttattacaaacgatgagaacaaagtagaaaaaatacaaaaccacatcgtatcaatatttccattatggctgaactggggaggggtgatgatagcgatggctctactgcccctgttaatatggagttttaatggcatattcttcggcttctttctgctaatttatgcatttggcgtttataactaccttcatcttctttattcaatttctcccttttatcatggagattagccatgttatggtatacactatttcttctgtgtattgcacttgaacttataaccggaacaggatggttactcttaatcagtcttggtgcattatcaagcgccattgtgggcttttttcttccgatatcacaagaagccaatatatgcttctttgcgtcaatcagcatactggcgtcgataattaagttcttctatgacaaaaaacataagaaattagacactctcctggtgaacccagggcattcacgttttaaaggaaaagaatttacgctcagtgacgatattgttaacggcaaggggcaattactcattggtgatacattctggcctgttgagacgttacacaatgaaaactaccttgcgggaacaagagttattgttacagacatgcaaggaataactcttaaagtaatgaccatcgaagacaagagtgaaaacaaggaataaatcatgcatctttcgttgttaattccgcttacaggagcagcgatgaatgcactatgtatttttattatcagacttctggataaggattttattgaagtctacaaaaaaacgctaaaaaaaattactgcattacatattttattgatggtgttaagtgtcacaggaatagtatgaggacaattctatgcgaaacgcaaatgaaggaatttctcttgcagctattgtagctaaagaaacaacaacaggtaaatggaatggtactggtgggggtattggtttaggtactggtggtattggcttattcatcggaggtgtttctggttctaaacaagagcagacacaaagggcaaaaaactttgaatcgcctaaagaggaagaatacagtctattaaatgtatacggttcgataataaaagttctcgttttcggcgtgctatttggtttatctgcccgtttatttacatctttatcaaacactggttctgattttgctgaaccagtaacaaccaccacagccacaggaaagattcaatctattatgggtggcatggcagaaatggtaagcattttaggcaccgttgtcccttttttagtaattatcacagcaatgatctggtttctgtttttcagcagcaaacgagaaaaagaagagttaactcgagttgaacgtgaagctgctaaaacaaaactccgtatagatgtctatcaccgtttacgttacgttgaaagcgatcatgtcgtttttgacccgattacaggccgggaggttccggcagaacggacgtgtattaataaactgattgaggcacttgttgatgaaagcaacgacatctcaaaaagaaattgacgaacttctgaatgcaataaaaacaggacattcaaaattcattctatcaatacccgtacatactacccatccaatggcccataaaataatgaagccttacttcaggagaacaggaccgcttctgtattcagatagtatattcaggatttgaagaaagcatttatttatatagggcatacaaaaatgagtgcttttattaagctggcatctgttctggcgttatttattagcccggttgtggttgcaatagcaggagaacaatctcactgtacaaaaatcaacgaataccctttcatcgtcactcaatgcgacgacggaactgtgacagtggtaaatgtgataaataaccgtgtagctgtgtgccgtaaaggggaatcatgcaaagaaataaa

SEQ ID NO: 170 - DNA, 63079 bp, Artificial Sequence
  plasmid TP114pilV delta shufflon-rcicat
attataactctggacacattacatgactcaagcaaaagctaatctgagaaaacttcgccgtgcacgttatgtcccccctcgaacagtaaagaaaagcatagcgaatacagaacgtgtcgtttcaaaagcaattaccggctgtggtgtcttccgtgatataccacaagtaaaaatcaatctcatcgaaacaaggaaaattttacaaatcgaactggctttatccattgctaacttatctgaggcgaatccaattgagatacgaaaaaaaatcaaaagcattgaccgacaattatcttcaacctcaaaaatcagaactacattatgaaaaaaaacgacgatttaatcactttaccacctcataacagccacgctctcgattacatcattaaaaaagcgtttacaccacgtaaaaccaaaacatcgacagcgacccacaacgtttatagttacaataaagaagaatccacattaaatttccaaaaaattggagaagcaatttttttcggcacagacctggtaattaagctgaagccaaatattagtgcctctggtgaactcttcatctgccagaaggactaagctatgaacattgtttcagaatttcttgagaaagtaacaaccattgttgaatccacagcggcgacgaacgccgctaaggtcgcacaggcaatatctcctacattttttgcggctatagccttatacgttatttatctaatatatgaaatcacgtatgcccaacgtgacatccttatgaacgaggtgacgaagaatatcggtgcattcgccctggttggtgcattcacttattcagcgccttattacagccagtttgttattccttttgtaatgcacgctggctccgacctttctgctgctgttactggaggttcaggaactgcaaccagtgttgataatttgtggaacgctctatctacgaatttaaacaacttccttgatacaagtatgagtatttatggaaagttccaaattgctgagaaaatgggggtttatctagtatgggggattggctatatcggcggaatgcttctcatctattacactactgttttcttgacactatcaactttcatggttggaattcttctttccgctggcattttattcatttgtttcgctctattttcatcgaccagaaatatgtttactgcatgggtcggcagttgtctcaactatatactgttaaatttattctatagcatatcatttagtttcttaattagtttcgttgaatcagttgtccctgttaatggagatataaaactatctattgtagtttactttttccttattactattatttccatattccttatagaacaagttggcacactctgttctacattaacaggtggggtaggtataaatggccttacatcagccgctaatggctttggaggtaaggttgcatctggttttatgcgagcatcaggactccgatctttcaccaatggatttgccagcaaaatgccaaatccattctttaatgcaggaagtcgttctgcatcagcattagttcagggattaaaccgtggaagtaaacttaaagcggggtgattaacatgaaagataaagtattatcatttctctttgctggaataattaccgtaacatcaccatcaatctttgcatctggtattccagtagtagacgttacagcgatagctaaaacagttgaagaagggctaaatcgtgccgctgaagcggcaagacagcttgagcaactcaagcaacaatatgaacagaccataagatacgctgaagaacagaagaaaagactcgaaggcttcactgatttcagcaatggctttgatagcgcatccagctatatgaaggattctctatcaacaataacaaatagtgcaaaatcagatcttagctctttgcgatcgcaatatgacttatcaagcaacattgcagagacgcaacaaaaatatgatgcaatcctggctaagatcaaattctatgaaaatttcaacaatgaaatgcaggaaagggctaagagattaaccacgttacagaaggagttcgcgtcagcagatactccgcaaaaaaaagctgacttatctaaccaattgaatacagaaaaattgacaatggagctacaattgaagcaatatgatattgcagagagacagctaatcgcgtctgaaaatgcaagacaagaggctgttagtcgagaaaagtttaaattaatgatgcaataggtgttcgaatgaaaaaattcataagcactttaactatcttgtcatgcttccttttagctgcttgtgaagacaaagtttatgatgtcagttactacactgaacatcttgaacaagcccaagatgttgtcgaaaaatgcagcaaaggggatatgtctggtcaaaactgcgaaaatgcgcgtgaagccattcaaaaagagcaatcgggtaaagcatttaaaaatatgatgcaataatccttcattaaaaacagctcgcaaagcgggctttttttggctgtacgcagtgaccagttgataaatagttctaatgttcgtgctgcattagaacaacgcacaaaaagaagagtacaagaagacagtgcgggatctaatggaacgtttacaatagaatcaccttccctatagcaaggtgattctatttaaaagaatacccgcctcgtgcgggtcttatcttgcttaaagatctatgaaacctccggcttcgggtattaaactataacttgctttggcaaatattgtttcattgacttcatggaatcttattttctccgcctgttcatatgttacagggaagaacacgccccctggctcattaaacatcataaaatcaccttgcattgcgttacaatgacaacaatgattcgcgtaatacttcatttttgctgttttgctatgggatggataatataattttgaatactcattaatccttgagagagcagaggttgaaattatttcaattttcgttaaatcagtccaccatactctactggttaaccaccgataaatcatatttttctttgaatcaaaatactccatacccttaggggaggatgtttcataccattcatctaatatacaatcttcccattcggcaggatcaactccccaaataacgtctctatacttataccaacgaggcaaaaaaacaccaaacacaggagttattttcttacagcgccaacatgactggtaactttccgcaatataaaaacgttgagaaaaaatattgtaatcatgttcgtttaattcttttacccactgaataaaataaattggatttttcccctgtggaacaaaccatttccgttgttcttgatcccattgcgcccctttttgtttggctaactccttttcttcaaaaggtacatttaaataaaaccgcgccataaccaacttaactccagtattctgttctgatgatgcaacaggatagatatcaaaactaaacaaagagtgcaattccgcctttaatggctcattcgtacccgcctcgtgcgggttttcttttgcctgaaatatggaggaactccatgaaatccatcattttatcgatggttgccgccaccgcattactgtcaggctgcgcggatagcaaaacacaaccagtacctgagtcaccgttaaccaaacatgaccatcagatcacgttgaaaattgataccgtgcgaacagacctgccggacagttctcctgtttgtttgaatggtatgaatatatacgaaagtctgagcgagcggcatccaggcttgtttgccaaaaatcagaacgtgattttccgtagtgcattctttgatgacggtcaggcgatatcctccgaaacaatccgcaaaataatgcagagtaccccgtgcgttgaatcacaaacaacatctgccggaagctgggaacctgccacggaactgctcccccgtcaggcaatatccggtgacactacactggctgaaaaagatcggactgctggcttcacaatgcggatagcaccggagattgagcgtggaaatttccacctgctactcacaaccactgacccgatacggaaacagactgtcgagcagaatattttactcaaaccggaccagccccttatcgtgagtggttttactggagttaatgctgatagccaaagtgagaaccggattgtcatcattacgccacacgtgcgttgattcccctgatatttaaattacccgcctcgtgcgggttttcttttgtctgaaatatggaggaacaccatgaaatccatcattttatcgatggttgccgcaagtgctatcgcactctctgcccccgtatatgcgtctgatccgtgtgcttccgttctttgtctgtacggtaaagctatcggtagcggcggcgggagcgaatgcaaaagcgccgaaaaggacttctttaatatcataaaaaagaaaaagggatctattcgctggagcaaaacctttgatgcccgaaaagcgtttcttaatcaatgcacgaccgcagaccctgcggcgatctcaaaaatcatgagtaagttcggacgttcctggggttaaccatgaaaaagctcattattattcccaccacattattgctgaatgcgtgttcccatgcccctgaacccgcacaggcaaaaggaggttggtatgaactgaataccacaattgagcaggtaagagcagacacatactataacggggtgatccttcagcagcccgtgtcacagccaaacagcactgttcaatacagcaatgataattatctcaaaaaggaaaccataaacgtaactcccgcgcctcgtattgcagaaaccgtaaaaccacgttctgagcaatcagcgacagcgccaaaaaaccagggcagcaataatagttttctgaagccgacaacaaacagcataacttcatctggtgagataaaaacagcagccaaaggagcaactaaacagcattctgaacaaccagcactctctcccgcaaagccaatcagtagcaacaaccatcaggcacaaacggcacaaaagactgatcagcagacaaaaccgcgtcctgaacaaccaccgctaatgtcaaaaagcggttttctgaaaaaaaacgctaacaacgctgttccggccaccacgcttacaggcccatcaacacctgaaaagcaaatttactttgttcgccatgatggtaaaggctcgctgcaaaaagcattaaaagaaattgtcccatcggactggacggctgaaatatccccggaggtaacgaaaactttccgtcgcacgatatcctggcagggcaacgatcaatggccttatgtcctggataaaatgcttcgcaactacggtctgacggtaattaagaacaccgaaaaaagacatcttctgattgattttcaacaacagaaagggaaaacatcacaaaaagcacctgtatctcctgacaaaacccctgcatctcctgtcaggacaccagtttcctctgacaagttacctcaaaaaccgctaacgcctgtcaccgttccgcaaaaacagacagaaaaactcacctggaatcttaaaaaaggttcgacgctgcgggatggcctcaccgaatgggcgtcaagttcaccgtgtggtaattcaacctggaatcttgtatgggatactcctgtgaactacagaatagatgctcctcttattttccggggaaactttgaatctgcattaaaagatacgctgatgctttatctttcagcagataaaccgttatacgcattcaggaatattgcacaatgcgtaatcacaattaaagacacacaacaggagtaatcgctatgggttggttcttcagcttgctcctgatattcctgtcaataggcagttactatctgacagataacaataaccaaaccatacagcgaatgaagttgcttcctgcaaaacaggaagcaattgaatttgtccatttcgcaaatgttatcaatgactatctttataaatatccagacaaacgtaattcaggaggaacgttaacatctgagcaaatcggtataacacccgtttatgatattcatcatattatttacggtaagcgagtttatatctggtctgccgatacagaaggtctgatgtctgctttgcagcagcaaacaaaacattcagcaatgttaggaagagtaaaaaataagaagattgtcgataatcaggggaatgatatgggcgttcccgttccttcctccattccagaagaggctattgtactcattaactaaatatcccctgacaaggggattctgaactggagtctgcatatccgacacatcattatgtgggccggatatatcgctacggcgcggacttcagtccagaaaatctttaccggagatacccatgcaggataatgatgatgtcagcgagcttgatattgccactcgtgaagtccttatcttacgatgcaatcttattcagcttgcttctgaatatataaaaataaatcctcttaaaaacacccgaatctacacagatttaattcatcgttcagcagatgttatcaaaaatatcgaacaaggtaacatccagaataaacataattatctgtcacaggatgtaaaacatacgcttgttttatacgacctgtacaaatcagactttgaacaatgtccgggggcaaaatcccttatacctgtcagggaaaaaattgtctcgctgaaagaacttctttccggcgctaatgagctggacagtatcgttcgtcgcccccgcaggaaaaaacgttcttcacgaatttaatatcaggagataaatcccttatgcagttatcagcggctgttctggcagcactgataagtcagtgtgcccctgatgtatcacccgatacgatgaatgccctgattatgactgaatcaggggctaatccatatgtaatagcgaatgtttctgacggaacaagtaagtattttaaagatgaaaaaggagctattgaatatgcagaaaaattaacagcagaaaataaaaggtttagtgcaggtctgacacagatatacagcaaaaatttcccatcactcaatctgactaataaaacagtttttgacccgtgtacaaatataaaagcaggagcggcagtcctgacggacaattatctgagacaaaaggagggtagtagtaatcaaaaaattctccgcgctttatctttgtattattcgggtaacgaatcaacaggatttattaaagaaaagaaatttaacaacacttcttatctggaacgggttattcgtaacgcgaataactatatcgtgccatcaatccgtgaaaaaactgatgaatcagaaataaaacccccgaatgatgaagagaaaacatcaccggactgggatgtttttggagattttagttaatgaaagtcaaatcaactttgcagtattttatcctggcgtttttcctgtcactaactgcctccgttgcctatgcaggtggactcgataccgcaacaaataccatgacagaacttaagacatgggcatttagctttggtggtgtttgtgctttgtgttacctgatctataacgtcatcatggcattcatggagaagaaaagctggtctgatgtaggaatggcgcttgtctattgttccctcgctggcggtgcactttacgccgggaactgggcgctggaactcttcaaataagtaatccatatatacaactgtgccgcatatttaccttatgtgtgaattgcggcttttttcatggtgagttatggacaaagtaaatgaacatgtcagtgagtcattcatgacttataacgggtttaaccgtcctgcgttaattgctggtatacccttaatgttgttattgttcacggcttttttcgctgttctgacaggcttccccgctattttcctttggggtataaaagggataattattcctgtcatatgtgcgctgtttctttttatagtaaaactggcctgtgaaaatgactcaaacgcactaagagtcatccgtttaaaccttatggggcttttgttaaaaatccgccacagagatttaattattggttattcatctgtcaggtaacatatatgcacaaaatcaaattaaaaaacagtgacaatatggatgttgctcgtgaatatcccgattatcgcttccatataacagacagtattatctttacttctgacaggaaaatgctggcttcacttgttgtagcaggcattccatttgagacagagaacgataatgttcttacaaatttatttaacagcgttaaaaacttcctgattgggttaggaaaggaaggcgacctgtatttatggactcatcttatcaagaaaagagcaaccatcaatggagaatggaattttgacaatgattttttaagcaggttttcaaaaaaataccttgctctgttcacatccagcgcattctataaatcaacatggtatctgacatttgggattccctacgatgatgttgataccggaatcgagcgcatgaatgaaatgacacaacaggcgcaaaaagcacttctaccatttaacgcttctttattatccgtttacaatacttatattagtgaggtggcagactatctatcactattgctaaatgcagaacataacatgattcctttatcatccacccccttatcatccagtatttgtgattctgaatggtattttggtgctgatgttcttgaactgcgtaacaacgaatcggatagtaaaaaattcgcaacgaattatattttgaaggatttcccgatagaaacaacccccggacaatgggatttccttctcaaacaaccctatgaatttattcttactcaatcctttatttttgagtcaccaacaaaaaccctgaagaatatcgattcacagttaaacaaactacaatcagctaatgatgcagccaaaatacagcaggaagaactcgaagctggtaaagaagcggtcgcagccggaattacgttgtttggttcactacactgcgcattaacggtattcggtgatacaccagatcaggccagaagcaatggtataaagctctctgctgagtttattacttcgggtaagggattccgcttcagtcgcgcctcactcgcatcaccttttgtttttttcagtcatatgccgctgaataagaggcgtccactggatacccgaagaacaattaccaacctggcctgtctgatgtcttttcacaattattcctccgggaaaaaatcaggcaatcctattggtgatggctccgccataatgcctttaaaaacggattcaggcagcgtttactggttcaatacacattacagcccaccggaaaaaaatgttaccggacaaaaaattgccggacacgcaatgtttcttggcgcaacaggcacagggaaaacaacatttgaagcaacagccagcggctttcttcaacgctttgaccctttaatgtttgttgtggattacaaccgttctaccgaactttttgtccgcgcatacggagggagctatttcacattgcaggaaggtatctataccggctgcaatccgtggcaactggcagaaggcccggaatcgcccgtctggcacagacttctcgcatttctgaaacgctggacacaggttctggcacgagacaaccagggcaacccctgttctgatgaacatggcattgaattaaacgctgccgtggaaagcattatgcgaatgcctgtcgaagaacgccggacagcccttcttctcgatatagtcagtcctgaacttcagacgcgtctcgccaaatggtgcgacaacggcgaatatgcctgggcggtggattccccccggaataccttcaatccactgcatcataaaaaagtgggatttgatacaaccgttgtcctggacacaaaaaacggtattcatcctgcctgtgaacctttactcgcggtcctgtttttctacaaagaaatcatgcaacgcggcggcaatctgatgctctccattattgaagagttctggatgccagcaaactttcccatgacacaaagcatgattaaaagcgcactgaaagcggggcgcatgaaaggtgaaatgatgtggttaacatcacagtccccggaagacgccataaactgcgcaatttttgcggcgctggtacaacaaaccgcaacgaaaattctcctgcccaatcccgatgcaaaatgggaaggatataaagaaattgggcttactgaaaaagagtttgaaaaactcaaagagctgacgaaggagtcaaggaccatgctcatcaagcaatctggctcttctgttttcgccaaaatggatttgtttggattcgatgagtttatccccgtgctttctggctctgaaactggcctgtctatttttgatgagattattgctgaaaaaggagatgtagctcctgatatctggataccagaactcctgaaacgcctgaacggttaatttctctgttttatacagaacggaaaacaatatgaaaatccccctcataattgcctccgcgctattaattagtgcatgttctcacacccccaatcctgtgcagaaaaaagggggatggtttgagttaaacacagcaattgaacagatcaaagcaggtgattattaatggaaaacacaaactattatgaacattcaaaaaaagaagccaccaaaaagaaatttgaagaaaaaaacgaaaaaaaggattatttcaaggccatacgtgactttgagcgcagtgaaattgaaatcataaagaaaaaggcaaaaacatttaccattctcgccattggtgaatttgttgtaatttgcattcttggtttcgcaatagcctcccttgctccattaaaaaccgctgtaccgttccttgtgcgagtggataacagcactggatatactgatattgcccctcaattatctgatgctaaggaaagttatcaggatgttgagactaaatatttcctgtcaaaatatctcattaactatgaagcatacgactggcagaccatccaggaacaggccgatacagtaaaaacaatgtcttcccaaaaggtgttttcagcttatgacaccatgattcgtgctgattcctcaccactgaacattctgaaaaacaactacaaaattaaggtccagattaattcagtaatccttctaaggaaggatatggcgcaggtgcgtttcaaaaaaatggtactggatttatctggtaaacccgcccccggatacagagcaacagagtggatttcgacgatttcttttgactgggataaagatatcaaaacagaaaaagagcgccttgtgaatccgctgggactgcaagttctgagctaccaacctgatccagaggttataaaatgatgcttaaacgcactactgcgatagttcttttgtcgatgctacaagtacctggtgctttagcagctatgtacggcacaccatcggaacgagacgggcgtattcagaccgtagattataacgagcaggatgtatttaatgtgcgcgtaaaagcaggcgcacaaacaacaattaagttcggacaagacgaaacaataaaagatgtcggaattggtgatccagaagcctggtcagtatcggtcagggacaacactctgtttctgcgtccaaaagcagaagaaccggatacaaacgttaccgttcagaccaataagcatatatatcctctttacctgatatcaaccacgaaacaacccacgtatattctgcgttttaattatccgaaaccaccgtcagctaccgtaatgactgaaaagccatttccatgcactgatggtggaataattaatggtcattatcaactcaagggggacaaatcaattttcccttatcaggtatgggataatggcgaatttacatgcatgagatggactaataaacaggaaattccggtcctttatcgtgttgatgccgatggaaatgaacatctggttaacggagacagaaataaaaacacaatggtttactatgacgtggctgaaaatctccgtttgcgcctgggtgatcaggttgcagatatcagaacatcatcaatcgttaatcgtccgtggaataaaaaaggtacgtcaaacggaaaaacacgagtagagaagttcagctatgaaaaataaagatgatgaaaaaaataatgacgcgggaaatcgcggaattatcgaagtaaaaggtaaagcagcaccaaaaaaaatattaatcctcatcatattactgattgccgcgttatttgtgatcattatcttgtttaaagttctgtcacgagaacaggtcgttcagcaaacacctcttgagaagtctgacgagacactggtcacaaataccaacaatggcgtttcactgacaacaatgatgaaaaacatcgaagaaaaggaaaaactcgatgccgctaaccgcaggaaagcacaggaggagcaagaacagaaacaggcagacaatgccccgtcagcgccagcatcacaaaaggccgatcaaacagccgtcaatgtgatagccaacggcactccccaaaccgccagtggagatccaaaccaaccacaaccattgccaaaatccgtccgacaactgatgggcgacacaatggtgaagatcgacaatcaggaaccaggcgaaaaaaaccaggaaagagatgatttacagggcagtcagtacgcagacggaaaggtatcccctgtgctgaaccgccgatatctgttatctgcgggaacagcattatcctgtgtgctcaaaacgaaaatcgtaacctcttatcccggtatcacaatgtgtcagttaacacgagacgtctggtcggataacggcgaagtgcttcttgcccgtaaaggagcattactgatcggggagcagaataaagtcatgacacagggagtagcccgtgtgttcgttaactggacaacgctcaaagatgaaaatgtcaatgtgcgcattggcgcacttggcactgacagtctgggtgcttccggccttcctgcatgggtcgataatcattttggtcagcgttttggtggtgcattgctgctgtcattacttggtgatggtttagatattctgaaaaacagcacgcaacaaacaggctcaaacagcaatatcacctacgaaaacacatctgacgcaacaaaagaaatggcaaaaacaacgctggacaatacgataaatattccccccacggcatatattaatcaggggactgtattgtctgttattgttccgcgaaatatcgacttttcatccgtatatgaacttcagtaattcagtaaagcaattgatatgaataacatcagagataccagtaatacatcacaaccacgagataacagtaaaaccgcaagacgatatctggatatgacgggtatccagtctgttcttaatattgaacatgtcacagaaatatctgtgaataaaccaggaacaatatggtttgaaggaaaaaatggctgggaatctaaagatgcgccagacgcgacttttgataatttaatgacacttgccaaaactctgacgaacttatcaaagataaaaataccacttagccatgataatcccattgcatcggtagttcttcccggtggggaacgtggacaaatcatcattccacctgcaacagaaaataacagcgttgtgatatctatccgtaagccatcattaacgcgctttactatagatgattatgtccgaacagggcgttttgataatgtcaggattgcgacgaaacacgaagccatcctgactgaacggcaacgctacctgtatgaattatcccggcgtccagatggtcaatctaaagctcaatttttaagagaggcagttaaagaccgtcttaattttttaatcgtcggtgggactggctccggtaagacaactatagcaaaggcaattgcagatatctttccacctgaacggcgttatataaccgttgaagatgtaccggaaatgtctctgccgctgcatccaaaccatatccggcttttctacaaaaaaaataccgttgaagcgaaggaaatcattgaagcgtgtatgcgattaaagccagatcacatctttcttgctgaacttaggggtaacgaagcatggagttatctggaggcgcttaatacagggcatgaaggctcaatcagtaccattcatgctaataatacttatgcctcattttcacgactggcaagtattgtaaaacaatctgatgttggtatgactgttgatatggacctcatcatgcgcacgataaaaacatcaattgatgtcattctttttttcaaccataccagaatgactgaactgtattacgaacccgaagaaaaaaatcgctttttgagcacaatgtaaattctggagataactatggatgcaaaaaagacggggggattaattctcttcctgttactgcttcttgtgggtgtgcttatagcctcaaactatctcggtggatacacagcattaagatattcatccgttgatatgtctttgctcaagtgggatacattccattctgtaatctcaacattttctggcaacccacaatataaaaaactcgtttttatggcatggtttggattcagcgttccattaatattctttgccatattcatgttaattgtcgtgattgggattatgcctaaaaaagtcatctacggtgacgcccggctcgcaactgatatggacctaagtaaatcaggttttttcccggataaaaaatcaccttacaaacatccaccaatactcatcggtaaaatgttcaaggggagatacaaaaaacaatttatttatttcgccggacaacaatttttaattctttatgccccgacacgttctggtaaaggggtggggattgttatccccaactgcgtaaactatccaggaagtatggtcatactggatatcaaacttgaaaactggtttttatcagccggattcaggcaaaaagaattagggcaagaatgctttctctttgcgccagccggatacgcggaaactatcgaccaggccattaaaggacagatacgctctcaccgctggaatcctcttgattgcgtcagtcgcagtgatttacttcgtgaaacggacctggcaaaaattgctgcaatccttatcccggcaagtgatgatcctatatggtctgattctgcacgaaacctttttgtcgggttaggactttacctgctggacaaggagcgttttcacctggaacagaaagccaaaggtcataatgtaccggacgttcttgtttccatcagcgccatactgaaaacgtcggttcccgatggcggcaaggatctcgccgcatggatgggacaggaaattgaaaaccgtagctggattagcgataaaacaaaatcattcttctttaagttcatgtcagcaccagatcgcacaaggggaagtatagaaacaaacttttcatcaccgctgagcatcttcagcaaccctattactgctgaggcgacgaatttcagtgattttgatatccgggatattcgtaaaaagcccatgtcaatttatcttggtctgacaccggatgctttaatcactcatgagaaaattgtaaaccttttcttctcattactggttaatgaaaactgtcgtgaactgccggaacacaacccggacctgaaataccagtgtcttattctcctggatgaatttacatcaatgggtaaatcggaggtcattgaacgcgctgttggttttacagcaggttataaccttcgctttatgttcattcttcagaatgaaggacaagggcaaaaaagcgatatgtacggtcaggaaggatggaccacattcactgaaaacagtgctgttgtgctttactatccgccgaaatcaaaaaatgctctggctaaaaagatttcagaagagattggggtgcgtgatatgaaaatatccaaacgctcaatatccagtggtggtggtaagggaggaagttcacgtacacggaatgatgatgtaatagagcgcccggttcttcttcctgaagaaattgtgtctctccgggataagaagaataaagccagaaatattgcaatccgtgaaattataaccagtgaatttagccgaccatttattgccaacaaaataatctggtttgaagaaccagagtttaaacgccgcgtggatatcgcccgtaacaatcatgttgacattccaaacctgtttacacaagaagtcatggatgaaatagcaaaaattgcagaaatttatctccctaaagctggaggaaaaaaagtcatggttgccggaggcaatgtgattactaatccagaccttgataatcacgataaaacagacgtatctgaataatcctcgcaaccagcaaatagtattttgcatattccataaggtaattaaacatgaataaaaaattgctttgtttattaatatcctcttttttattatcaggctgtgcaaacttcaaaaaaatcaatgctaatgaacttgctgccgaaagagacgcacaaaaagcgactgaatacgcgaaaaaaattcgtaataacccggttatccaggattcaacaaaacaatggattaatacaacgccaattattgaaaagcaggtaaagcaatcagcgccgccctgcccgattgtgattaatactcgttcagatattgagctacgccagatcgcacaacgcatcacacaaacctgtcatatcccggtacgaatcagcgccgatgtctggacctatctgaacggtacaggcactggctcaacacaacaaatgacaggctcaattccagcacctgatgcaaatggaatggttcctctggcgtcagtaggcagtcagccagtaaaagtctcttctggcggtacatcactccctgaactgaatatctccgggcttcctgccctactgcaaaccgtatcttcacggctgggaatatcctggaaatacgataaaggtcgtatcacattcttctatctggaaacgcgctcattcccgattacatatatggacagcaatgtggcatacaactcaaaagttgtgagcggcacaatgtcttccagtggcagtaccggctctacaagttctggcggtatgactggcgacgcatcaaatacgcaaactacaaccgtggaaatgaaatcatcgctgtacaacgacctgaaaagcgaagtttcctcaatgctgacaccaggtacagggcgcatgtatctgtccacaggttcactgacagtaacagataccccggatgtactggacagcgttcaggagattgtgaacaagcgcaataatgaaatgagtcgtcaggttgtgctgaacgttgaaatcctgagtatcaagaaatcaagccaggaacaggcgggaatcgactggaacgcagtatttaatgatggtcatcttggtctgagtcttggtggctcatttggtgatgccgccgagaatgttattaccagtggtgtatccatcgtggacggtaagctggctggctcaaaagcatttctgaaagccctgtcgtcacaaggcagcgtcagtgtcgtaacgcaaaactccgctgtgactaaaaacctgacgcctgtccctatgcaaattgccaatcagcagggcttcattgaaagtgtcacaaccgattctaccgccaatgtgggatcatccacgtcactgaatgcggcaacaataacaaccggattcaatatgactctgcttccatacattcagccggattcacaaaacctgcaattgctgttctcaatgagtctgtctgacaaacctacttttgaggtgttcgaaagtggcggcagtaaagcacaaacaccgaatgtggatttgaaaacaattaatcagactattgatctgaaatcaggccagacagtcattctgagtggattccagcaatcaaaccggaaaaccagtaagcaaggtgtaataaccccctccttctttggacttgggggtggcgttaacagcgaagacggcgacacgattctggtcgttttgattacaccaaatgtgcttaattccggctccagtgcagtaataaaaaatgtgaactaattaactgaaaactccctgaaaaaacacagggagtttttttggaggtcactttgtctgagaataatcagaataaccagaatttcacttcggttattaaaaacaagcgtgcttttttctccggtctggactggaaaacgcttccttcagaagaaaagaatgcgcgtacattcgcaagaaaaaacgacgctgaatattttctctcctgtcagtatcaggattcagaaaatgaaaccaaaacgatggtggcatttatcagaaaagaggatcttcccacaggggcgtcctcattctggtcactggcactgatgataaaacccctcatcgaacctgacggatacgctatctgcgaactcggtgatctttatggctttgtttcctgcgtcaataacgttctcgtcaacgatgttgtaggtaacaaaagtcagatcatgagtgctctgacaacatttcttgagtttaatgaaacaccagaacccggctggaaactataccagcctgaatcatgggatatcagccaggcactcccctcactcactctgtctgcgttgattgacgtaaaaaaaccgccgaaagaggcggcgtttactcgcgtatcccgaaaacgtcagttcatgatttatggcggaagtgccattctggccatactgctctggaacgggatcaccatgtaccaggaataccgggaaaaagaagctgcggcagaagctgcacgtcttcgtctggcaaaagaaatggcagacaaacaggcaatacagattgccccaccgtggcaacatttacctgaaataaaaccatttattgataaatgcattgataaatgggatgcactgcccttatcgatcgccggatggcgttttgaccttgctgaatgcagcacatccggtaatgacgggctgttacgcacatcatataaggaactgagcggcgttacggtcgaggacttcagcacacggatacgagaaatattccaggggacaaccacagcaacttttgtattgccagaaggcagcgccgggggattttctcttcctgtcagttttgacgtttcgcctgatccaattaccccggacacattgccacaggcaacagatattcaggaacgcctgacaacatttgcacaaaaaatgaggttaaaactcacctggcaggaaattgaaaacacaaaaacagatgaagaaggccgtccaataattctcccgtggaacgagtatgaattaatgattcagaccagcaccccgccttcaatacttttcgctaactttcatgaacctgccgttcgcttccagtatgcaggaataaaactggaagaaggaagactgaattatgagattaaaggtgcattctatgttaaaaataattaaaccaacgattatttctgtctgttttttcagttcacttgcttacgcaacagaatctgaaagcacaccaaaagacgaaataaaatattcatctccgaccattttacaggtagagcagattcaggctgaaacggtaatttacgaagcaaagctggcgcgtcagaaggctgtcagtgaattgcgtaatcttgatttgaatggtgtagcgtccgcaacgccagcaataacgccctcttccgggtattcttctcttgcagataccgatataccagcgcaacgtgtagccgctaaatcacttcgtgttattgaaatatttggtacaccacaacaaatgtcagcacgaatttctctcctggacgggtcagtaactgatgtcaaggtcgggcaaagtattcctggtacttcttataaggtggcatcaatcactggtaatggcgtctggattcagaatggtacagagaaacgccagcttattctttaatgctattgaaagagacgacacataatgtttttttctgacgcagactatcccggaaaagatatttctgatgttgtatacgtcagtatatctgaaaaagacgataaacctgttcaggtttatatcgctgataacagtaaaggacagcgtgctgttcaggcttatattggcactctgaatgttaaatatcccggacaggtaaatataacctcgacaactcttgatgttatcgcatcccgctaccaggacagcgaaaaaaggtctgattcaaactcatcacaacacttaaacagcaaccaggaaaaggtcattagctacctggcgaaagcaaacaaactgggaagttccgatttgcacatcacacctggtcgggacggctccgagttcacttatgtcgaagcacgcgtgcatggggaactggaaattctggatgtcatcccgcgtaaagaagggctggaattgctgggtgctgcctattctggaatgagtgatgttatcaaaggtacgcagtttgaccctgcaataccacaggatgcacgtatcgcagagaattttctgaagcctgtaaatctttttggggcgcgctattcgcattatccgtgcgtgggtggtgtgtacgcggtcttccgcctgattaaagatgacagcgaggatattcccactttcgaagaacttggctacatgccgcaacaaatccagacaatcaggcgaatgttacaacgcccggaaggaattatcgttttatccggccctacagggtccggtaagtcaacgactctgagaacggcttcagaagcctatctgagcacgtttggtttcaaccataacgataatatgcgtctcccccgaaaacgccttttcaccattgaatcaccgccggagggccgcattcccggcgcaatacagacggcagtcagggattccgtcgatggctgggttgacgcgattaaatccgctatgcgacttgatccagacgcgatactgaacggcgaaattcgtgatcacgcatcggcattagcagcaatcaaagcctcgatgacaggccaccttctgttgacgaccttacacgccaacgatgccctgaatattattgagcgccttgaaatggagaatattcaggccaggctgattgcagatcctcttctgtttatcggtctgctgagtcaacggctggtacaaaaactctgtccttactgtaagcgcacttatgctgaaatggcagacaaactgagtacagaagaacggaaactcattgaggaaaattgcctgccggaacaggtccggttgcgcaatcttgacggttgcgagcactgttataaaggcgtaacgggaaggacggttatagcagaagtcgtctcacccgacgcacgtttttttcagttatatcgtcagtccgggcgtctggaagcaaaatcatactggcactatgaacttggaggaattacccgtaatcagcacttattacacctgattaatcatggcctggtagatccgctgtccgcacacttcatatcccccattgacgaagataaatactcaatgctcccggaggggacatggcgataaaagatatatttgagaaactcaattcgatagaaattgatttctctggaatatcccactggctggcaaaatacacattcaggtattccagaataagtttatatgaagatttatctggaatgttaaatgatggcataaatgtaaagcgtgctcttacacacctgattgatgtagaaacagactacgggaagaaaacggggtcttctgcaacctactatatttgttgtgagtgccttaatgcactgaataacacaggggctatatcttcagcattaaaaaaatatataaaggaggatgaatatcaattaatatccagcggtgaaattcgcggcgaccttgccggaggattagttcaggccataaaaattgtcagaagtcgttctgaaatgacaatgactcttgttatgtcgatgatttatccatccgtactggtttttggttgtctggcaaacatgtatatggtccacgataccataacacctgttttcctttctctcgcaccgaaagaacgctggacaagttctatgcgattactgacagatacgtctggtttcctgatagaaaacggaacgtatattctctgcttctgcatcgtactgtttttcctgatcagatattcgcttgcgcgttatacaggaccgggccgtcagtatcttgattacattcccccctggtcactttataaaacatttaatggtgtaagttttctcttcaacatggcctccatgttaagtattgatattcccgttgcaaaagcactggaaaggctggagaaaaacagcactcaaaacagatggctactcgaacgaataaaagaaatcaggagatatgttttacttggacagtcacttgcaatggcaatgaaaagttgcggttatgacttcccatcgaaattatgcattaacaaactattacttcattctgaaaatgctgacaatgcattgatgatgtctaactatgctgataaatggctggaggaagcaaaaggaaaagtcaaatcaacaggagtctggataactgtagtatccgcattaattgttttcgcatttattgtaatgatgattactgctctctacgatgtcagtaacgtcctgcaacactaatccctaatatttttaacctctcaataaataaggaattatttattatgtcttctattaatattttaaatatgcgttctgttttttcttctctttctgcacgccgtaaaaaagaacaggacaaaggggcaacactgatggaagtgttattggttgttggtgttattgttgtacttgcagcaagtgcatataaactctattcaatggtgcaatccaacattcaatcatccaatgaacaaaacaatgtcctgacagtgattgccaacatgaaatcactgaaattccaggggcgttatactgacagtaactatattaagactctctacgcgcaaggattactgccatccgatatgatcgcagatacaactggcgcaagcgcgaaaaacccgtggggcggctccgttacaatcacaacctcttcggataaatactccttcaatgttgttgaggccagcgtaccgaagaaaaactgcatggcaatggtaaacgccctgcgttcttccagcgcaatctccaagattaacaacacttccacatcaactgtcgatgcggcaactgtttgctcatctgacagcaatacgctgaccttcagcactgattcctgatttttcatgtgcatcggataagcgccttcgggcgcttattttttccatgtttacaggaggagtattgtgcgttctgttctttatatcctgctatcatgtatttcatcattaatcttttcattgcaacccgcatattcagcgacaacgacccaatttgatgcctgctttgcacaagccgggcaacgttatctgattgatcccctgcttctgaaaagcattgccactgtagaaagttcactcataccagaccggataaatcacaacaaagaaaaaggaaaaatattaagcaccgattacggactgatgcaaattaattcatcacacatccccaacctgaaaaaacttggcgtaataaaagacaaatcagagcttattgataacccctgtctcaatatacaaattggcgcgtggattctggcaacacattttcagaaatgtggcataaactggagttgtcttggcagttataacgctggtttcaaagaaagtaacgaacagaaaagaatcaaatacgcacgctatgtctacaataaatacatggtaaggtaacttatgctaaacagcatatttaatacggcgatactttgctgtgcaaatatcgtctgtcaatgctacgcctacaatgaagtaaaattccgtttaaataaacttaatgtatcttataaaaccggcacagagaaatattactgtctgatactgacaacgcttgccgttctgtatctttcattaaaccagctatcactgattcaatctataatagtgattgttttctatgctttccttacattaatggcttgtatagaccttctttcatttctactaccacgcctttataccgtgacatttatcttctctggcctgttatatcagacatggaataacaatatattgtctggtttgttttgtgcaatgctgatgttcttcattatgctgtttgtaagactttactttgcatataaaaacggaacggaaagtttcggcatgggagatgtgctacttattgcaggaactggcgtatggtttccaacgcctgagattgcctgttcaattgtatttattgccgttatcggcggaattattttcttcactcttggcggattaaacaagcaaaaaaaatatatcccattcggtccgttcctttgtggcggaatgtttgtttactcactcgtaccgggaatattattctgaggattaagagcaatgaaaaagacagataaaggtgtatctcttcttgaggtattacttgtcatcggcataatggtgatggttatccctaaagtttatgaaaacattgaaaaccatctgaataatgttcgctggcagaatgcagcagaacacgcaaatacctataacaccgctgttcgtaattatgttgctgacaatgcatcaacactacttgctggctctttacccaaaacaatcacgccagcaacactcattcagaaaggctatctgaaatctggtttttctgaatccaattttggacaaagctacattaccggtattgcaaagaacagcaaaacatcccgtctggaagccctgacctgtagtaatggcggtcagtccctgtcagaagccggaatgcgctcggtagcaagcatgattgaagggcttggcggctacatcaacagcagcaagcaggcgattggcgcgggtggcggctggtctgacacgccttcaaattacgggctgaactgcgcgaccgggcatattgcaatggcacttgttggcgctgatttgcaggaaagcgaccgtttgtatcgttactccataaccaatcgtcccgaccttaacaggatgcatacggcgattgatatgaacagcaacaatctgaacaacgtcggcactttaaacggcaacgccgccgcgctctccggcgatatcagcgcacgtaacggtacgttctctggcgcaatttcaggaaatacagccacaaccaacggcgatatcacttcgaataatggctggctggtcacaaaaaacagcaaaggctggatgaacagtacctatggtggcggctggtatatgtccgattcgtcctggttgcgcagcgtgaataataaagggatttatactggcggccaggtaaaaggtggaactgtacgcgctgatggacgcctctatacaggcgagtatttacagcttgaaaaaacagcaacggctggcgcttcctgctcccctaacgggcttgtaggccgcgacagtacaggggcgatactttcgtgccaatccggtcggtggcatcaccatcaccatcacggcgactacaaagacgatgacgacaagtaaatgggaattagccatggtccatatgaatatcctccttagttcctattccgaagttcctattctctagaaagtataggaacttcggcgcgcctacctgtgacggaagatcacttcgcagaataaataaatcctggtgtccctgttgataccgggaagccctgggccaacttttggcgaaaatgagacgttgatcggcacgtaagaggttccaactttcaccataatgaaataagatcactaccgggcgtattttttgagttgtcgagattttcaggagctaaggaagctaaaatggagaaaaaaatcactggatataccaccgttgatatatcccaatggcatcgtaaagaacattttgaggcatttcagtcagttgctcaatgtacctataaccagaccgttcagctggatattacggcctttttaaagaccgtaaagaaaaataagcacaagttttatccggcctttattcacattcttgcccgcctgatgaatgctcatccggaattacgtatggcaatgaaagacggtgagctggtgatatgggatagtgttcacccttgttacaccgttttccatgagcaaactgaaacgttttcatcgctctggagtgaataccacgacgatttccggcagtttctacacatatattcgcaagatgtggcgtgttacggtgaaaacctggcctatttccctaaagggtttattgagaatatgtttttcgtctcagccaatccctgggtgagtttcaccagttttgatttaaacgtggccaatatggacaacttcttcgcccccgttttcaccatgggcaaatattatacgcaaggcgacaaggtgctgatgccgctggcgattcaggttcatcatgccgtttgtgatggcttccatgtcggcagatgcttaatgaatacaacagtactgcgatgagtggcagggcggggcgtaaggcgcgccatttaaatgaagttcctattccgaagttcctattctctagaaagtataggaacttcgaagcagctccagcctacacggattcacttatgatagaacaactacagagtgattttttattctggatatttatttacttcctgatagtaggtttgcttatcagaaacattcatcttaccagaaaaattaaatccatcgaaaaaaacaaaatgttcccagcggaggaatatgctgtcctggacattgaacagcatatgtccaataaatatattgggcggctagtaacccgttttatgaagagaactaatggtgcacctttgttaattgtgtttccagaatacgataaaggagacaacaatgaagacaaaaattctccaccattccaacttgtaaaactaacatccaacatcaacaatattaaagaaatttattccaatgatgacttaaactgttttctgaataatatttcggcacaaaaaaatttatatacaacgcactctggacctagccaggcatggattgaacatgcatatcctttgcaacaagtaactattctcttacaaggcactcgtcatagtgaaagggaagatataatcagtcaacttgagattattctttccagactaaaaaatggagaaaatacaggttttgagcatgacgatgattttggatattcatttcagtatgatgccgcagcagtaggaaaatcatcatttttcgatgaagcggcaggaagaaaataagaataacgctctatccattgcacagacaaattaacgttaatcttttatgaaaatcttattaacaatatttatttatctgcttaccgcttttcagtctgcaaatgcaggtggaataccttatacatttaaccagaaaattcttcaggggaaagttattcgcgttctcgatggcgacaccatagaaattaaaacactacccgcaaaaattgttgtgtatgaagttccgatccgagtccgattgataaacatcgatgcccctgaaaagaaacaaccttttggacgctggtcaactagtcagcttaaaactctggttgcaggtaaacaggtgacagtctcttattcacataaagaccgctacggacgcattatcggtcatgtgttcacgacgaacggcacggatgccagccgctttatggttcagtctggcgctgcatgggtatatgaacgttacaacgtggatgagtcattaccggctctgcaacgggaagcgcaggaacaaaaacgtggtttgtgggccgatgcaaatccggttccaccgtgggaatggcgtatcagaaattaagggggcaagaaaatgcattcttcttttggtttgccatgattctgtctttttatctttgtgcaatattaaaggcttctttttaacagggggcggcatgtatgtaattaatcaacagacaagggacaataatattcttacgttgcatgatgtttttaaaatctatcaaaatacaggggggcttcgtcttgtaaaaacagaggagaatgaaaagtacatctccattatcatttgtggcgtttttcgtattagaaaaaacaaaaagaataacaaaatcactttgtggggatacaagctaagagataagcacactggggtatggaccagaagaaattcatttcctggtaagatttttttattctggtctaaaaaatctgcatacgacatggacgactggttaaaatatgcgattagctacatcatcaaatcattgattgaggctggatattcaattgaagacaaactctatttgttacgcattggagaggaagaggaaaacagcgagagtcgttatatttccacactatatccatccaatgtatattactcatatgagtatggaatacatgacattgttcattgccttggtaaaatagcatcattcaactacccctataatacacgatatatcagcagacatattttactcgcagagataaaaaacaaaatttatcagagagcattaaaaattataggggtggataatgaatttaatgcttcaaaagcattgagtaaagctatatggataatggtagataaaaagatatttgcacaatatgccagagcttcacattgttcgatagcttacaattcaattcgtcaggcattatttgaggactatctggatttttcaaagcgaatccatattgtgaatgatatggattttttcggattgtggcctatggttggtcgtctaagacaacaacataaaaatggtcagtttatactatctggaaagacaaaagagttatatgaaaaaatcagttttccctgcaaacttagttatggtgagttcagaagtttacgacatgttagtttgtcattagtatatgctttaaatgataaacatgataatgcatcattcagatttacagtcagattattacgccatccacttatcaagaactatcctgtgagagcaatttactggattatcgattatattagcattcgagcttactcagaaaaagaaaatgatatttatcgtatatgctcaaaatggctagaatatcatcgtgatttatttaaaaacattggcttttatgaccgtaatactgaatccaggcaaacatcacgctgggaaatggaaacgaatcagttgtgtcatgcaattgactggttgttagcagaagaacggttaattcataaaaaccaggagtggccttctttctggagactatctgatgaatggacgcgacaagtgaagaataacgttattcccgtaatcccaaaatggaaaggaactgggataaactggcagaaagttgataacggtgtaaatgaattaattacatttgatgctctgtgtcaggaaggtcaggagatggaacattgcgttgccagttatgcagactggtgtgcatctggagaatatattgcaatttcagtcctgatggataatgaaagagccactcttggactttcacgaaaagaacatgatttaacctatcagtttgaccagatgagaggtattcgtaatcaggctgtttccagaaacatgctaattaaaggcaggcatattttaaaaataatcaactcatcactaaaaagataatgagtcatcgcatctcattacagcaccgatgactgggtgtttattctttctgaatacaaaaactgactgaaagataaggaaagaaagttttcttacctgtttgtcttacgcaatggtgaactggttcaccatgaggtcaacaaatcagagcttctttgagaggtttaacatgcaatatgcattgcttgatggatttgaacgaaagtttttgctggatgctcttgaattcggtgttctgaaggactggaaagaaaatccggtaaaagaacttcctgatattgatgaatctgctcaccccttccatgtctgttatggtggatatttattaaatcctggtgtttcagattcagatattagcagaaaaataaaagaccagacaggattctggctggcagctattgatgatacccgcatggattgtcattcaatagcttattatgatattcacacactccctctgatttcgtgtggtcatcaaaagatagttccttttgccgcgttaataaaagctgatgaatgcatcatttcaaaaatttcttcgtattctggttttgccgtaacagcctttttgagaattaaagaccaggatattgcaactaatatacttaaccgtgaggggatttttgcttttaatggctgtgaacgcagattcagacatccagtaagtgaagataactggcaacaggcagtatcagaagaacgtgctatccgttgtgccaaaagattaattcaatgtaaaggataacaaaatgaaactttttatcgcagaaaaacccgcagtagcgaatgatattgttaaggcgcttggtggcaattttacccgtcatgatggctggtttgaaagtgataatactattgtgactaactgttttggtcatattatcgaatcacagccccccgaaaactataatcctgaatacaaagagtggaagattgaaacactccctttgcgtctttatcccgtaaaataccagcctgtagaaagcgccgaaaaacaggttaaaacgattattgagcttatcaggcgtgctgatgtgaccgaaattattcatgctggcgatcctgatgacgaaggacagctacttgtcgatgaggtcctggaatatgcaggcaacacaaaacccgttaagcgcgttctgatcaacgacaacacccttccggctgtgaaaaaggcgctggcaaatcccaaaaataaccgtgacttcagaggactctatctcaaggctctggcgcgttctgtagccgacgcgatatacggtttatccatgacgcgtgcttacacaatcccggcaaaaactaaaggctataaaggtgttttgtctgtcggacgggtccagacacccgtgcttggcctgattgtaaatcgcacccgtgccaataaaaatcataaatccagcttctactacaccatgaccggacattttcaacgcggcgctgatgttatcagggcgaactggaaacctggtgagttcgcaccgctgacagaccgcaaattgcttgataaaacctgggcgaatggaacagcaacatcacttgcaggaaaaccagccacagttgaagcggcagcaacagatgataaaaaaacggctgcaccgttgccctttaacctggtacgacttcagcagtacatgaacaaaaaattcaaaatgactgctcaaaaaacgctggatatcacacagcagctacgcgaaaaatacaaagcaattacttacaaccgttcagattgttcatatctttcagacgaacaattcagtgaagcaccacaaataatcgatgccctgaagtcggtgtttgatcagccaatggatattgatacgacacgtaaaagcaaggcatttaacagcgcaaaagtaacagcgcatacagccatcatcccaaccgttagcgtaccggacgtaaacgcactgagcaccgacgaacgcaacgtttacctggcaattgcacaacactatcttgtccagttcatgcctgaaaaggcatatcaggaagtatccgtcgccattcagtgtggtgatgagtcgttttatgcccgtgccaggaaaactacagacagcggatttgaagcgtttcttggtgtggaaaatgccggggacgatgaagcagaagtcgaaaatgatgattccgcttttgatcttctctgtaaaattcgcacaggagaaacagtgacgacaaaagaagtggttgtgaatgagaagaaaacaacgccaccgccattattcaccgaagccactttacttgccgcgcttgttcgtgtcgcagattttgtcactgatccagtgattaaaaagttactgaaggataaagatcgggataaaaaagacgaacatggcggtattggtacgccagctacgcgggcttccatattggaaacactgaaaaaacggaactatatcaccctggaaaaaggaaaacttattccgacagataccgggtatgcgcttattgatgctctgccggatatagctgttaatccagatatgacggcattatgggcggaaaaacagacactcattgaaaacggagaaatgaccatcgaacagttcgttgacgaactgtacaatgatctgataccgatgatcagtaatgcgaacagtgctgaaataaaagtttcccccagcgcgccgtctggtcagtcacaacgcctgtcctctccttgtccttcctgtggtaaacagattgttatcaggccaaaaagctattcctgtacaggatgtgaatttaagatatggaaagatttctgcggcaaatcattaaccgataaacaaattgaaacgttaataacaaaaggagttacaagtgaattgaaaggtttcattagtcaaaaaacaaacaaagaattttcagcaaaagtaaaactggttgacaaagcaaccgggaaactgggatttgagtttacacaaaaaagtaagaaataaatccagcagtagaaatcaaacatcgttgtagctactataggacaaggatgttcttcaggaattgtacaatgaaaacaaaacaagactggctctttcagttaagacgttgctcaacactcgacacacttgaaaagattattgaaaaaaaccaaaacagcctccccccttctgagcttgagtcgtttaatgccgccgccgatcacaggcttgcggaactcacaatgaataaactctacgataaagtccctccatccgtctggaaatatgtatattagttttcatctattaatattagatgtttgatcgacacaaacatcagcaatccctatacacctttcatagaatgaattgaaccctgtatatagcctgtctgaaatggatatctggcaggctatcttaatagtgttataggtggtatgaatgtttttcctctacgagacctacaatttcttctactacctgataaagttaattgtcattcagccacaatatatttgtgtctatatgatattcttttttttcaatgcagggatagcatatagcatcaccaatgatatcgaggatcaagtatgtcgatggcttttattcgtaagtatgttacatgctctgatgattccccccgcagttatcatgccacttatcatgccaccacaggaaatacttcaggaaacagagaaaaggcaggaactacatgaatcaatacccaaaacatgcaaattaaaggcactggatgctcaacaaggtggtttattcggcgttgataaagatgaatgggtattccctgacaataaatcattctatctgcctgaaaagtaccgtccagaaaacaggattacggaactagccatgatgaaagaaggataaagacctatgaagatattcaaattgtttgttctttgtatcccccttctgtttagtctttttttcgctggctacggcattttgtcaaaaaatccatttgaaacactaccgtgtctgtccgccagtgctttttgcctttttctgtttgacatactgaggcgatcatttatgaagtgaggtgtcttgatgttaacgttgaggttgagaaagttttgttggttcttataattatagaccggattaaatcatgaaagaatacgaaaaaacggctttaatatattccttaaaggaaagcaatacattagttcttcggattatactaatctctattttagttgtcggggtgatttcaggcgcgatatacttatataacttggcgatctcgttgtttgattcaaacccaacgtctgtgcaattcaccttttgcggagtaggctgttttattgctctattacttcaatggatatctaatgttgatgcaaattacagagaaagaattggggagcaaccaagtacaataaaaaacattgtacaatatttatttgcagccattattaccattagtttcattacaatggcattaacagccatattagtcttaaaagactcgtccaacatatggctcaacattacttttattgcattattactgtccatttttgtagctattatttctgtttggggttgactttttttcttaaaaagcccgaaaaccgggcttttttcttaattagtgcatgtcctgtgaatcgtcacgctgctgctgcgattcctgatgatcttctctggcctggacaaattgttttccaagagcatcttctgccatttcacgagtgaatccgtgattaagcaaatcggattcggccttctccctttcgaacttcagtccttcccctctgaacttgtcctcaaagcgatcaattgcctcaagaatcttgccgtcttccggcgtgcaatcccgtccctgtgctttctcaatttcatgacgctccacgcgttcagcatttttcattacagcgtcaatcccctgagaaatatgttcagactcgacgcgataaatgacagtatcgcgcttattgagatcatgtagctcgcattcaacccggccccactcaatagcatccttgagagagctgaaatcttttatttcagcattcagaccttcatgtgttgagaaatagacataatccttctgttgttccagtttattcacattttcaatagcccttgtactgaaatggatacctgtaattaccggaacacgagccgatgtttggtcccccgttaaaacttcagaaggtgtttttccagtgatcgcggcaaattgctgctccgtaacatccactctggcaactgcatcaccacgctctaagccatgcttaccagcgaccgcaaggcgataaagaccaccttcccccctggtaatttccgcctccacaacgatatccccattgcaggaactgaactgagaacggtctttaaccaggaagttttcaagcccggagatcatatgctcgttagctgaaatactggcgagtatctcttctggtgattctctggacgaatcccccgcctgttccatcactgccatattagcgtcattaacagcgtccttaattcctttaaaggcgatttcttctcttgttacaggtgtgattaagatatcatcctggttaagcccgtgctcctgaagcatcttatttttatattcagatgcgtcgtgcaatgactcaaaagtcttaatatcttcactaaactcatccttcgaaaaagaaaccgcatacactggagtacggtattcttcatatgaattggcaattatttcaaatggcctatcaaacgttactaatgccccctctggataagaggataattcatcggttgagacagttttagacataagcacaacagtatcaaaaccatcaccatttaaataattgctttcatatttttctattgcagaagatttgctttcctcataacactgaatagccgcatctttagaatgaaagacgataccttcattcaaatcatggaagcgactaaagtttatacaataaatttcctgtttattatgcacctgcgcagtagcctgatcgtgttgagtagtaagctgctcctgaatcagagcctgtgttctgtcaatacctaactcattcacaattttgcaaaattcttttgcgtcgttttcattatcaaaactggcaacgtcaaaaatatcatcgctgtctccaggtacatgtcccagcacttcccaaatctcattttcatcgctatccagagatttcaaatagccaaattcaccatttgtgcctttactaagcatctgtgaatccagggtgtttgccctggtaataacaccaggatcatatgaagatgtggcctgctctgcgacctgtgcttgctccgcgacctgtgctttctccgcgacctgtgcttgctccgcgacttgtgcttgctcggtggcctgtgcttgctctgtggtctgtgcctgttcggtggcctgttccttcaatgcatcacctttctctattctggattcggactcctggctattttcctgtgtttccacctgctcaaacttattaccctgaagttctgcttttaattccagcatcatctgttgatactgctccgggcgtaaaataatcttcatgtcctgctctgcggcaacttcagcgcacatttttttgaaatcttcagagccggtaagtttgagtacaccaccaaacttttccctggaatactcaagcattattccgatctcttcttttgagggatttttacccgcaacgacaaagttccctttgtcggtaaagacaggcttttccgattcctgatcgcgataaacaatcctggaatcctgcttatccatcacaagatcttttagtttggtgttaacctttttcgcctcttctaagcggcgctgggaatccaccgctttctgaagcgaaagttcgggttcgtcagcagaaatggcgttgatttcatcgaagttgagatagcttttgagacgttcaagggctttcatttcatctttatccttatgccagtcagcatgatattgacgaataatgtgtcgcccatctgtgtcgagttcagaaagacgctcaagtgtggttagttttttgtaaacaatcacacccacggcaatatcacgctgttcacgtggtattaacttcaactcgcgtctcatctctcgcagatcattatacagcttgccacgctcaaacctgatagtatttcgtaatgttttttcagataaattcagtgagttaagacgctcacgagcttcatgatgcgtaaggcgtctgtaggttggatagcgcgtatatggcgtgttttctaactgctgtgaataaacttcaagcagaaaggatttcgcatctttccaggcaagattaatatgctttgtcagaaaatcagatgcgttcatattacgattccccacagaaaaccggggggaaccgtcctttgctgttctgattttatgctgcgctggaataatattaaaacgctcggcggcagaagacagaaacctgacaggatcaatatttctgcgaatttctgccatcgttgtaatttcgtttttctctgccgcctcattcagagtctgaaacatcgtttcacacaaaaaagaagagcgttcaagactttttattcctgactctgtgaattgtctatcataatcccgtcgcacatcctgaccaggatgttctctttgcggtaattgctctgccagatcacgctgcgaaatatctgacaatacactgatagagtcgggtcttgtgaatccattgattccgtaaaccataccgcgttggggcatacgtgacaatccgactgttgcttcagattgacggattctggcaaactttttaggacacgacttgtaacctcccgctcgtcctgacgtttgctgagaatttctttcgttaagtttttctcttgagtcatattcttttatcctctctttcagaaattcaatctgctctgcttcagataaacttgtatagtccttacgaacgctggcgttgagaaaaacatgtttaatctcgtgactggttttgtttacccaggtattgagacgtttttctatttgcttaggcgtaggtttttgaagagtcaactttccctcttcaatatagtttttacgaaacaacgggcttttcagattagtgaactttttatctcccggtaacttaacagcaatatattcactggcctttccttcatttcttatcctaacctcaccatattctgcaacaatctgtttgaatacagcataatcacttactttttctttttcaattcgataattcaattcattcttaaatgcagaattacgctctacatcaagatctgcttttactctctttaaaataacactataatcactattttttctcggaaagtccttcgggctggcaagattatatttattgttaatatgctcctgtattgcatctagctgttcgatagtatgacctttccctataaggccaacaggatcaagtttatctcctgtaactagattaacctttggaatgacaatatgaatatgaggctttctttcaattaactctcctgtactattatcctgaatatgccggatttttggcaaatgtgcttcagcatagaaagaatattcttcaggatgataagcattcatcaataattttttataatcatccacaaccgcctttaacatttcatttgatacgtgactttcatgaaaagacaacgtaatgtgcaaataacggtcctgtttgttgtcttcaatagaattgataatcttatctgtagtctggagatcaccatcaagaacaacacgatgatcaagttcatcacgtgtgtactgacgttctgctttgcgaccatttatcaggtaatcaacaataccgtcattaccaccaccatatctgacaatcatttggctatctcctgaaggcgatcacgaataccaatcagcacatttaaaatctttttataaagcgcctctgatataataccctttaaatgatctgagtttaagcggtgagctatctggttaatattattcccagcccaacttaactgagaaagacaccgtttgtattccgggatatggcgtttatctgatgtgtagttttttattttaccaatagtaagcagcctgaaaaattcagacttactaatttcaagctctctgattgctctgtcaaatggagcatactcttcttctgtaagtctgaatgtcacatgaacacttttgttggcttttttcttcataagtcctcaaggttcgtagaaccgcactagaacggctgcgccgttcggggttgcaaaggggcgtcccctttggcacaagcattgtaacatgcccggaacgggcttgtgtacaaagcttatcgtgcctgtgttttagaaggacaaaaaaatgccgtgcatacagcccacacaatgactcacataatcacccacaactcaaaacacacagcccacacaatcacccacactttaacccacaaaaaagaccacaaccccattgacaacccacaaaacaacccacataatcacccacacaaacggcgagcaaattgctttaaataaggtattatgccaatgtaggaggtagagagagagaggaaatgtaacaaatgaaaaagatcgagagtttattatctccaatatgcgaggctataaacgaaacaaaatcgaaatcaaaacaggctgtcttcaatatgtatttgcaaaatatacttgaagcaaagaaatattatacatgggagcaaatagctgattacataaacaacaacaccaagacagaactagcccaaaagacttatataaatatgacagagagggctaaaaaaagacaaaaatgcactgaaccaaaagaacaggcaaaaaccatagatgtaattgttcagaatgaagctaaaggcgatgaaccgagagggggggtaaaaggttttttttcaaacattagtgagaacaaaaaagaaatagagcacgatccaagtgctacgaatgaaaaatttataaataaatatctttaagtaaaggagcattataaatgaaaaactcaatcaatttcatccttcagggtaaaggtggtgttggaaaatcattcgcgaccgcaatactggcacaatactttattgatgaaaatcacatggataatatcgtagtcggtgacacagacccggttaatacaactacggttaaagtaaaaagattaaatgcagatttgatacaaatcactgaaaacagcaaagtaatacaatccaaattcgatccaatgttcgaatcgatgctgaccaatagtcagaatacttttgttattgacaatggcgcatctacatttttaccgttaattcagtatttcaatgataactgtgttatggacatgtttgaagatgtagaacaagacgtttatatccatactgttatcgttggtggacaagctcttgcggataccttgcagggatttgaagaactgaaagaactggttaaaggaagtaaggtaaaacttattgtctggataaatgaatttcagggtattccagcacttgaaaatatcccattaatagaaactaaattcattgaaaaaaacaaggatgtaatcgctggcgttgtggttattcaggacagaaaaagtgatgcctttgcctctgacatcaaagagctaacagaaaaatcactaacactgaaagaagctcttgagtccgaccattttggattaatggctaaatcacgattaaaacgagtcttcaatgacatttacaaacaattagatagcatctatgacgatgaatacggtgaataatatgagtacagttaatcagccagaattaaaacagcctgaaaaggctgtttccagtgaagatattgataattttattgttgatgtattcaaggagacagggcataaaatatcaaaagatgatccagttatttcattaatttttctgaaccaaaagatacaggaaaaattcagcaatgagttacaagctaacttcacagccctgtctgagggcttcagacaggtcgtttcatctgtagaaaatgactatattcaaagattcaagaatattgttgagacgtgcggcgatctggataatgaaataaaagaaaaagtagaagagggaaaaaacgatctaaaagaaacaagtgttgaggtaaaagaaaaattaacagatgatattattgaactcatatctggaattaaacgcaaccaggaaaaaaacaacaaattatatgaagaaaagttgaagtcattatctaaggctgtaaaacccttcagtacaagaacagccattgcaatttgtgccttgtgcacattatgcctgtctgcggcattttctggcgcaacctggtatgttgcacaacatgaaaaagaggcaagcctgcgcttctatgcaagagcttttcttgatatgaaaaaaataactgaagagagcatgagaaaattaccaaaatcagaccagcaaaatataaaactcaaactagacgaaattgattcaagaaaaccatagatatgaaaaggagtcactaatgacaacttttaccgacgacgacaagaaactaattaaagaaatcagggagcgaatcggcagcctggacgtgcgagacaatattgagcgtcgggcttatgaaatttctctggcatcgctggaagcagagccagttatgttctgtatatcaggacaaaatgtagattcagaagaacatgtatcaaccagcaaagcggttgttgatgcctgggttgaagaatggaatcaggttgacggaagtcctggcgaaccactgtacaaaactatgccactctactgtcacgctgccttgccagcgccggtagtgcctgaaggactggttaaagcggtgcgtttttatgagcaggtaaaaaatgagaatccgccagttgggactggtgcgtggaaagacgctgttgactgggtgctcgaagaggcttgccaggctgtaaatacagacatcaaaggatgaacgatatggcaaccaacaatcgtaaagccaagatgctaatttcccgtgtatacagactttgctaccccagccagtggttgagagttagcaatcgccgtgtggtgttgttctcattttctggaattgccagagagggaatcaaagataagcgcagcgcggcgcaaaaccgctggaaaaacaacttgcgcactaaaggagcctaatatggctattgccgcaagttacaccatgcatctctactgtgattgtcgccagtgtacaaatggtaaatatcagtcgccagacttcggtgagtatatcggtacgtcatgggctggctgtgcaaaagaagcacgtaaagatggatggcgaataagcgccgacaaaacacgtgcttttgcgcccggacataaagttttgaggattaacaaatgacaacatttaccgacgacgacaagaaactaattaaagaaatcagggagcgaatcggcagcctggacgtgcgagacaatattgagcgccgggcttatgaaattgctctggcatcactggaagcagaagcgccaaatttgcctggtggtttcacaattgaagaagcaaaagaattacacgaaaatctggtaaaaagtcacgtaagcaaggctttaagtggcgaaaaaatgaaaaaagaaaatcgtgatgccgatttgcgctggattcatggcgtaatagttcaggccgcgtggtttgtgaaagcatcactagggcagaatgcatagtgcgtacctgcttttctcctggcaacggtggatcttccgcttcctcgtcactcgctcgctatgctcggtcgctggactgcggcgagcggttagctatcaaaaaaaatccccgcacaacgcggggatagttttatttatatgcaagttcatgacgtgccgcctgagccagaaaatggctacgatctttgtatacgccgccactttctctcacatatccatcaatacgacgaatcaatacatcaggcaatgaaatattaatacgttgttgtttgccctcaatttctgacaaatcaacatcaattacaaaccagctatcacagtggttataatttgggttggcggaataagtcaaacacccttcatcatgaatatcatcaacagaatgagcaccgcttattaccatctcttccacgattgctaatatcgcttcacgcgccattgcgggtatttctgcctgagaatcagcagcagaaacacatccaaaatcaaagcaatcaaaaaccggaacggtgataccgtatgctgtatgatcatctttcggtgtttcgacaccaacagaaaagaacatggctacctccaaagtcggcggggattaaatccccgccatttttttgatcgatctgacagtacctagcggcaagtcctttttaggatgaggaacaggaaaagtttttcctgttattggcgaccaccatatctggtgactgcttgccttatgccgtttcaactcgcaaccagcagctatcagttctttcaacaggtcagcagatttcatatgtcctccctaacctgaaaacaattatacacacgcatacacacaaaagcaaattatttcattcgtatgacttatgaaacacactgtaaagacagttcaatctttacagtgtaaatcatttatccagttttatcgctatgcatgtgatacatagaaaatcatatagtgttttactatatgatacctgattgacacttttaactgcacatctcatcatttacatcgtaaagacaaacatagctttacaatgtaaagctatataattaaacactccgtgtccctgataaggaaaaaaaatggctcaaccaaccccagaaaagatactggcaatcatagatgatcatgatcgcgcacaaaaaaaacaacgcaacaaaaacgtcttcatttatttatgtctctgcttggcaattattggagtggtcgcgcattcctttatatcaacgtttcgtcttgatggtgtagccgtccttacaattcttttgggcgtgtcagcaatcgcattttttctacattatgtagaatcagggaaaggccagattcttagcagtgaccgcatattgtccatactcgctcaaaccaaagattaccccacaattcgacgtaaagttgttaatcgcttgctctccggttcaaaactcacgggtaaagatgaagagtacatattcagtgaactgaaaaaggctgaacaaagcaacgaacgtgaaaagagattgcaagcaattaaagagtatacatcgtaatacaacgtaaagcatcacttgtaaatacaacacactacatcgtaataccagaaaacaccaacgccagcgagcaacaaaaaggggcgattaagcccctgcgcgatgattaatgacttctttttccagtgcctagctctggatcaagcctgacgttaaacacacctttaaagggcgcgtcaggctcctttccgtcctccacacaggactgtaaatacaaatcaaccgatgttttaaattcccgttccaggtcagctaatgtttctgcctcaaaagtcaccagatctcgaataaatgccagctttccatgcaggatattattttcaaaatccggctcaactgtacctaaatatcctttatattttaaatgtttcataaaaccccagcctctttcaagaaaagttatcagatagaagggtgaaagaaaataccagggagcagcgaggccacatacccctaagcgcagcgcaaccgccggaaaacgcaccacactgtaaagacaataaaatctttacaacgtaaagctaactatgtaatacaacgcgctacacattgacatcctccacgccctaaaggacgtggattcctacgacgttcaggctgtcgcctgaatcatttcggtgggttcctgcttcaacgagcggcctgactgcaccatctctccacaggcaagaacggcgtgccccgccgctaaaatgttacgagcgccatttacatcggcgttcgctgtatatccacatacctggcatctgaattgactttgtgacaggcgattttctttcgctgtatgaccacagcacgtgcaacgctggcttgtgtacgctggcggaacagcaagcacctgaccgccacgccagagctgcttgtactcaagctggcggcgcatttcataccagccctgatccagtatcgaacggtttaaacctgattttgcccggacattgcgccccggctggctgaccgtacccgctgctgactttgacatgttgctgaccttcaaatcctcaatgactatcattgcgtggtttttgctgacggtcgttgtgactttgtgaaggtagtccctgcggatatttgcgatacgggaatacagtcgctgtattttgcgtttctgcttctgccagttgttgctgaatttgaccttgcggcttaactgtcgctgaagtctcgccagcgtcttctggtttttctgaaaactgtttacaggatcaaaaatagtgccatctgacagcgtggcgagtttagccacgccagcatccagcccgaccattgatactgaagggtgaaccggagttgatacttcactttctgtctgaatactgatgtaccacttaccgcaggactgactgacagtgacatttttcacaacgcccgtgacctgacggctgttccggtagcgcatccagccaagtttcggcagaaaaatacgactgttttcctgatcgagcttaacgccctgcgggtagcggaatgcatcattctgtccccgctttttgaatcggggaaaagccgcccgcttctggaagaaatttttgtaggcccgctcaaggtctttcagtgactgctgcaatggctgtgatggggcatctttaagccattgggtttcagtggcatttttccactcaaccaaccacgaggccatccttgggtaaggaatatatttgttccctgcctcatggttctcattctgaagcgccagagcacgattgaaaacgaaacgacatgcgcctgcgaagcgcctcatttctcgctcctgttgaccaccgggtcttaactggaatttaaatgcctgtagtcgtttcattcgaccattttaaacaaaaaaagccaggtggaaaacctcgccttatatcctcgccctgaaggacggggttttacggcgcactggataagaaagggagagcattacactctccctatatatgactcaaactaaagcattatcccggttatgcgcccaccaaatgatttcgctaataatccatgcttctatcgcgggtgtttttacaggttccccatttacaatgcggtttgcaagctctatcatttcacatactgacatttgagaatctccaaagatgcatctgtcatttggtaacaggctgccccacagcctgttaccaaccccaaattagtatttgctgattactttaccctccttaatcatttttattagttcctgttcagaatattcttttccgtgttccaatgtggaatatatatcgccaatagtccatactccacactttttaatttctgcatttagccaggattcatgcagaataaacaacggttcgcaatcatttcctttttcataaacataaatagattcggtatcatttccagaatcagaagtaccaacgactttttctatatcgaaatgtttttttagaaaagttgtgaaatgcattttcatgctcctgccgctgagcggctttggtggttggggaccatcccctcccgatgtgtttataataggtcagaactgacctattatcaagtatttttccctccattcttcaaaaaaaacaccatcaaatacatatagttatattcatgtgatgcccgacagggcatggaaggggcgaaagaaaataccagggagcagcggggccacatcgccccgaagcgcggcgcagccgctgacgaacataccaggatgcacagggccatcccttcgccctgcaaagccagaacagaccaacaggccatgatcatgctgatttgcgccgcagaatgccgcagttagcgcgagcgacagcgagtttacgccgtcctggtgcattacagcagggcggggcgctgtactgcgcgtgtgagcgtcagcgagctacgggcgcaattgctcattgttcaatgcaactggggctattaagtccagccataaattcagttatggtttttgtagcttattccgtgatttcgtcatacgttaattctattttcatcttaatattccttaattacttccagaatcagaattctttttattccttttacaaagtacataatcagggtgttctccagctaaaagcagaagaaatttaaactctactggtgtaagtgctgtaccgcttgcagttccgacaggttcttctttgcgacgccaggtacgcggactcatgctaaatatttcggcacattctttctgtgtcaggccaattttttgccgcagacgtttaatgttttctggtgtgttttcatttggcattttttccctcactcatttcctgaatcatcatagaaacaatttctttatcattctctcttaatccgtcgctggcaaagtcgatagtgtcgaatgccttctcatgaaaaacaagatcggcaacagttttcaccgttgctttcgtttttcctaaagtcgcagacttagaaaaagtttttactcgcttcaccagatgaaacgtatcaccttctttattcagataatattgtctgtcaccttttcttatcttcatattgagatagtctccccttttaacagtaaaggggcatatagcccctttcttttaactttttccggtaatcaaatcgacatcttcctgataaagctccccaagaaccggaacaacgccttttttataatcacggatattatggcagtctgtaaaaatgacgacataagcctcgcctgttttttcatgtttaaggcaaattgtgcaaagcgtcacgcgcacaacagaaaacacatgaccagttgtagagacgatagcaggaaaagtagattgtttcatgtttaactcctgccgctgagcggctttggcgattgggggccatcccctctcaatgcattaataataggtcacaaatgacctattatcaagtattttctagacgagctttattgaaaaatcattttcaataaattcatctaacatctttaatataccagctttatttacgaaatcatcctccataatttcgatacttgctgatatttcacatgtaaactcaatgctcctgtcaaatcccgcaatcccagctaatgcagacagcatatgataattatcaatatttatattaccaataagaactttcatttatcctcctgatatggggggaatccccccatattaaaaattacaatctggttgcaagtccggtttgttcattaaataaacattcaagctgatcacaataaatattatcaaattttgatatttcttttactgtagctccacggacacgggaaaatgtcaccaggtatgtatcagagaaggttaatttgattttaaccaaattaattcccttcattgcaaaatttgaaggtaaacgaaagcaaagaccagactcaccattttcatcaaaacaggcaaagttctttgcgcctgtcatagcaataaagcggtttccaccaagctgattaagaatttcagtagcaacaaatttggcgtggttttccatttttaagctcctgccgctgagcggctttggtgattggggaccatcccctctcgatgtgtttataataggtcagaactgacctattatcaagtattttttcctcctttctttaaaataaatatcgttaaatacaaatatttacattcatgcaatgcccggcagggcatagaaggggcgaaagaaaataccagggagcagcggggccacatcgccccgaagcgcggcgcagccgctgacgaacataccaggatgcacagggccatcccttcgccctgcaaagccaggacagaccaacaggccatgataatgctgatttgcgccgcagaatgccgcagttagcgcgagcgccagcgagtttacgccgtcctggtgcattgcagcagggcggggcgctgtactgcgcgtgtgagcgtcagcgagctacgggcgcaacattacattgctgcattcgcctggcattctccacgccttgaaggacggagttttactgcgcaccagataaaaaaaggggcgattaagcccctgtattcactattaacaatttaacatggttgcaggggataccccctgcaactattttcttagtagtatgatgtgaactcgtgtttttcttccggtgatcctttatatgctgtttcgaatgactcaatttcaattgctggcgtactgtaataatcacgcactcgccgttttaatggctcaccacagaaatcattgagtaatggggtcttatatccgctcattgaatgagtccgatgaactgaagcgcgaatctcctggacagttacggtttttttgccatgaacagaaataacctgatagaaattaacgttcgtttgctcatatccccaggaagatacaaacacatcgccaacagaaacagtgccgttattaaaagttaatgttttcatttttatctcctgccgctgagcggctttggtggttggggaccatcccctcccgatgtgtttataataggtcagaactgacctattatcaagtatttttccctccattcttcaaaaaaacaccatcaaatacatatagttacattcatgtgatgcccgacagggcatggaaggggcgaaagaaaataccagggagcagcggggccacatcgccccgaagcgcggcgcagccgctgacgaacataccaggatgcacagggccatcccttcaccctgcaaagcccaacggactgacaggccatgatcatgctgatttgcgccgcagaatgccgcagttagcgcgagcgccagcgagtttacgccgtcctggtgcattgcagcagggcggggcgctgtactgcgcgtgtgagcgtcagcgagctacgggcgcaacaacacaccaggcaaaatcgcatcctgaaaagttaccctgtaacatacacacaatgtaaagcgcaaaaaacaattacattgtaaagacacaaacatctttacaacgtaactataatgaatacaatgtaaagacaaataaacctttacactgtatatccgaggtttctatggggagagcattacttgtcgcatcagataaaggcggtgtaggaaaaagcaccacagcaacaaacctggcttcttatctggtaaataattcacgaacggtcatcattctgaagaccgataaaaacaatgatattcttagctggaacgaaaaaagaaagcagaatggcttattaccggttcctgtttatgaagagtatggcgatgtatcagaagtcattaagcgcctgaaaaaaatatgtgaagtgctgatcattgactgtccagggcatgacagcaaggaatttcgcagtgccttaactgtagctgacattctgcttactctcgttaagccgtcttcagatttcgaagcagaaacgctgactcatgtaacagaaaaagttcgcacagctcaacagatcaatccagacctgcaaccctgggtacttttcacgagaattaacacgacaaaaccacgccacagaaaagcagcgattgatctcgacaagttactccgggagaacccggtgtggatacagccacttcgtacacgtatttcagatttagatatttttgaagcggcctgtaatgaaggcgctggcgttcatgatgtacgtcgcgcatccagcctttctacagctaaagcacaaatagagcttttggcgcaagagttaggcatcaatccctaatggatgtaatacgacagctttacatcattagctttacacagtaaagctaatgtaatacacgaaaggtgatataatggctcttgacttgaaaactccggtaataccaggacaaaaaacagaacaaaccaatgcagacacagcccgattcatcaatgaagctacccgcaaaaaatcgggagcaactaaagtgaccaatgtccggcttggggacgtttacgaagatattctggaacgggaagcactgcgaacaggccagacaaaaacagcaataatgaaagcggctcttgcagcttacgaacacggcctggacgaaaacggaaaaaatcactggattctacagtcagccaggctgaaatgataaagcccttcggggctttatcccttacgttttaattgtttcttctcgctggctttcttacgggcatcgagaaccagttgcgcataagttgcgtgtgctttttttactgtaccagcaggtttcccgtaaaggtcgtaacgtgttgcgcctggtacagtacaattctgaagatattgccaccggaacgtcatcacctgaaccgcacaattccactcttcaatcgtcagatccacatccgggttatccgccaggtatttctcaacgtcctggagaatcccgcttttcaggggcaagttctttttttcgtctgtccatagttcaggaaaaacagcacgaactttattgaaacacttttcaaaatattctttcggatattttgggggaaaagtgatttgttttttcaaataccagggctgaggctgctttttatgtgttttctctgctacagcatctttcttctgtactttcttgttttcattaactgctgatttttgtacttcctgcggcttttcattcaccacaggattttctggcatgaccagaacgcggcgttttttgaccacaatcacgggtgttttttttggctgcatactcgcctcaataattgctgtcatattgactaattataccattttcagcagttaatatcctgaaaatacatggaaaagggggtatccgtacagaataccccctttgcaaaggcgcttaatgccagaaccacatcatccccaaaaaggcgggctttcgcccgcctccgggttgctacttaccgttggattcgtaagccagacttgccgtaacctccctgtttccatctttcagccggacctcgcacaaacgattccgggtcagatacgtgaatattaacaatgtgcagcacacgattaataaacaccaggtcagggcgtttttcggctgtttcatggccttcttctccttgcgtaacgcgcggtaagaggctatcctgatgttgttgaagcattgggatcgcctcgtgggtgtactgaccccaaaaagttggacagttaaacacgaggcatataggtctgattccgatattcaattggagtcagaccttttaatttcaggctaattcttctgctgttgtagtattcaatatattccgtaacagcatccttcagttcgcttatattactgaactcatcaagataaaaacactccgactttaaggttccaaagaaacactccaccacagcattatccagacaattgccttttctggacatgctttgtttaataccatgttctttaaggatattttgatatcttctcatacgatactgccatccctggtcagagtgcagaacaggatgctcgtgaggattaagctttttgaatgcctgatcgagcatattctcaaccatgttcatcactggtctttccgaaaggctgtaagaaataacttcgttgttgaagagatctattactggagacaaatacagcttgcgcccattgactgcaaattcagtaacatcggtaacccacttctcgtttggccgcgtagccttgaaatctctttggagaacattaggggcggtttgccctacctctcctctgtaagagcggtatcgcttgaccttaatcgctgctttaagtgagagggttcccatcaggcgctgaacagctttatggttaatctgtttcccttctcgatgaagagacagcgttaccctacggtatccgtatcggcctctattctcgtgataaatctcactaatacgctttttaacgtccgcatacttgtcaggcttgctgagagcctttagatgataataaaacgtactgcgcggtatctccgcagccctgagaagctcatcaagaggataaaactgccttagctcgttgagtactttcactttttcgtgggatgagctaaggctttcagcttttttagatacataagccgcgtttcaagaaatcgaacttgcctttcaagatcctcaatgcgtcggtcttttgacagctccaatgctgatgccgctttttctggatcaactgatattgcaatgtttcttttggtgccaatcttgagcgcgcgtaaaccagcttctccgcgctcttcatagaccttcagccacctggctacagaaccactaccagcaagcataaagtgagcagcagcctgattaagggacatgtgctgctcgatcacagctttcacgaccttaatacgcaactctggatcagcactaacgcctttaggtttgggaattaaacctttttctccatgtttttcatagagggcaacccatgtcctgacctgggttcgggggacaccaaaacgtgccgagatgatcctgtaaccatcatcagttgtgaagtagtgattcacgacttcaaggcgcttttcaaaagggtattttggctttgacatattaggggctattccatttcatcgtccaacaaaatgggtgcagtacatgggttaatgaaaaattaactacggggctttcttctttctgccgcacaacaagcatcagcagcagttccaggcttccggcaaggcgatcaacgacaaggtgcggatgtatgggcgcatcggtcaagcgttgattgaggccaagcaaagcggcagcgatccgttcgccgccatcgaggccgttatgccctgggacaccttcgccgccagcgtcaccgaagcgcaaacattggcgcggcctgccgactttgatttcctgcaccacatcggtgaaagctatgccacgctacgccgctacgcgccgcagttcctgggcgtgctcaaattgcgggctgcgcccgccgccaagggtgtgctcgatgccatcgacatgctgcgcggcatgaacagcgacagcgcgcgcaaggtgcccgccgatgcgccaaccgcattcattaaagactaactatcagaaaaactcatcgagcatcaaatgaaactgcaatttattcatatcaggattatcaataccatatttttgaaaaagccgtttctgtaatgaaggagaaaattcaccgaggcagttccatagaatggcaagatcctggtatcggtctgcgattccgactcgtccaacatcaatacaacctattaatttcccctcgtcaaaaataagattatcaagtgagaaatcaccatgagtgacgactgaatccggtgagaatggcaaaagcttatgcatttctttccagacttgttcaacaggccagccattacgctcatcatcaaaatcactcgcatcaaccaaaccgttattcattcgtgattgcgcctgagcgagacgaaatacgcgatcgctgttaaaaggacaattacaaacaggaatcgaatgcaaccggcgcaggaacgctgccagcgcatcaacaatattttcacctgaatcaggatattcttctaatacctggaatgctgttttcccggggatcgcagtggtgagtaaccatgcatcatcaggagtacggataaaatgcttgatggtcggaagaggcataaattccgtcagccagtttagtctgaccatctcatctgtaacatcattggcaacgctacctttgccatgtttcagaaacaactctggcgcatcgggcttcccatacaatcgatagattgtcgcacctgattgcccgacattatcgcgagcccatttatacccatataaatcagcatccaggttggaatttaatcgctgcctcgagcaagacgtttcccgttgaatatggctcataacaccccttgtattactgtttatgtaagcagacagttttattgttcatgatgatatatttttatcttgtgcaatgtaacatcagagattttgagacacaacgtggttcccgccatatgaaaatccggccagaccaacatcattctggcgctccgaaagaagggatattcgccgccgtgaccagcctggagcgggtcgcataatctttggccgcttcgtagtcgaggaacatggcatgaaccacggcagcctggcggctgcaaattgaaaaccgccccggttcgtcctgttgttgccgcacgccccgcagaatatgtatgctctgaggacctgttttattaaggactcatccccttatgttgacccgcaaaagtatcgatacagttctgctctctgttggtgctgagaagctctcacaacgagaatgggactggatgaaaatgctcaaacccatggacccaccacctgcgatggtgacgacctccatcctgaagcgccgtggcgatacagcagcccttaccctgctacaggataccggggtttaatccatcctcatgttgtccggttttactccccgccctctgaaacgtctgttcacagccaaccagtgctggacgtccttcctggatgcgggcggtctgcgcgatatcgaggttgaagccgtcaccaaaatgctggcctgcggcacacggatactgggtgtaaaagagttcgggtgtgataacccggactgtcagcacgtaaagtacctgaccaactcatgcggcagccgtgcctgcccgtcctgcggaaagaaggccacagacctgtggacagcaacacagctgaatcgtcttcctgactgcgactgggtacatctggtcttcaccctgccggacacgctgtggccggtgttcgaaagcaaccgctggctgctgaatgacgtgtgccgtctggcggtggagaatctgctgtatgccgcccgaaaacgggggctggaacccggtatcttctgcgccatccacacgtatggccgtcgtctcaactggcatccgcatgtacatgtgtctgtaacctgtggaggtctgaataagcatggtcagtggaaaaagctgagcttcctgaaagacgcgatgcgttcacggtggatgtggaatatgcggcagctgcttctgaaagcgtggtcagaggggatggcaatgccggagtcgttgtcacatatcacgacggaatcacagtggagaagcctggtgctgaaatccggcggaaaatactggcatgtgtacatgtcgaagaagacagccggagggcggaatacggcacgctacctgggtcgttatctgaagaagccaccaatagcggcttcccgactggctcattacaacggaggggcaagcctgagcttccgttacctggaccacaaaacgggagaaacggcgacggaaacgctgacacagcgtgagctggtcgcgaggctgaaacagcacatcccggagaagttttttaagatggtgaggtacttcgggttccttgccaaccgtgtgtgtggagagaagctgccgcaggtgtaccgtgcactggggatggataaaccggaaccagtggcgaaagtgtgctatgcacaaatggtgaaacagttcctgagtcgtgacccgttcgaatgcgtgctgtgtggctgccggatggtataccgccgggccattgcggggctgaatgtatcagggctgaagaaaaacgcgcgggatatcagtctactgaggtatatgccggcctgacacaggctaagtgtgcccgggaatcggtgaaagtataaaaaacagcctgttacggtataaaaatcgaccatacagagagggaaaccaccggagtggtgggaaaagcagaaaggctcacgtggcataaggcgtggacaatggtatcgactggtttttcaatttcctatacgtcaagatacaaaccaccttttcgccatgaggcagaaagcctcaagcgccaacagcattatatattgaccaggaattaaattcccagctttcggcgtggactatacagtgtgtgattcaccacgatgaatcctttgttgatccactgtgtgacctgcgcaggttgaactccggtcagcctggcgaacgatgcctgattcccccgatagaacttgttgatgtattcaatcaaaggcattttttaattctccgaaacaacgcaaaatcatatagtaatttactatatgatttttattccgcaagtgattaactcatcggatttctttgtagttaacgaaacgttaaatttagtttgtgcctggaatggcacgcaagaagcacactagcattatcattttgatcaaaacgctatttccccccgttattggggggctttctttttgatgccgcgccagcggcatgtaaggcggcactctgttgttttatatggcacagagctaaaccgccgaagcccggcgtaagccggtactgattgataggtttcaccttacccatccccatcctgctaagccatacccgctttcagccatgaaatagcttttgtgcgcggtcggagtggtcccgacaagggtttacccgcagtcggggcgtatctccgcgttagcggaccgtcagggccgcttacgagcgtgtatttggtacttccagccagaaggctgacagcgatgagatttcttagttacaacatccattattgaaagcgatgttgttcccgccctttgggcgggggcggcggcgcttttcagtgatgggttgggcactgtggctgagtatttgcagcgtttttttgtaggagggttggaggggctttgtttttcattaggcagaagtccatatgcccgccgcgaagcggtgggaggtacttttatattctgagcggcgcggcgttagccgctgcaagcgaaggcatttttgtgattatccacagttgtttcaaagataaatattttccctgcggcgaagcaacgcaggggattaaagaacaggggttaagaatatattgcgggtttgatgttctatgtttgctgctttctgaagttattcctttgcgggtttttgtggataaccgaaggcgtttttactccgataccctattgcggccatcaaaaaactgtcagagcgggacaaaatgaaaaacggtcgtcaaatatgaggaatttcatgaaatgcaggcaacacgaaaagccccgaaggggctgaagagagtgccgattgtatcaggcagctaaactagtggggtggcgaagctgtcagagccagttcaagctgacgtagatctctggctaccagttgctctaatctttctttagtgcaccagtacgcttcgtccggcggcatacgcttcagaataaaccgcgcaatttcgtttcgctgttcatcatacggcagttttgccaggcgattagcacgtttgcgctccgctgctttcttacgtcgggacttgatggcatcgagagaacgctgcgcataccagcgtttacgagccgagtgaacagagatttcttcgccctcgcggataacgccttctttaatcaattgcagacggatttcactttctgcaaggcgcttacgttgctgctcctgaagtttcaccagatcaactcccagcattttccagccagtttcggtgatccagacgtatttcggcagtcgctggcgggattcacgatcccatatcgtcttttctgacgttcccaacgtgccaaaggaaacctgctctgccagcagacgggaaaggcgcgatactgtgactgcggtttcaggaatcacgtctcccttactgtcttttgggcttatttcttctgccaggcgggagacagacatgccgacagtgtgcaatccacgatcacaaaaactcacaagtacaacccatattgcgtcaagcagccgctgtttctccggtcggaatttatatttgcgaccgacactctgacgtttcagtacataaaatggatgcaacgacatgtgcattctgagtgtgttctgaccagtgaccgggtcttttttaacgagacgattgtaagcgtggcccaactgtccgcccagcgccttatagttgtcgggacggaaccaggctggattctcacactttggcttagtggaatgttcaccccggcgacgttttgttgttccgcctttgttttcctgggggaccaggaatgagctttcaattcccgcttcgtagtcctgccagaaacggatctgctcttccggtgatagttcagaccagtgacgtttgctaatcacagcaagctgcacttagcttgcactgtaagagttgatatttccttctcatggaattaaactccacttcaggtaacaagcatacctgaaataaataagctcaaggctctgccttgatgtcagcccccgctaatcttcgctgcctggaaaacacgagattacgggggttttctttatctgaaatttacgttcttgaacaaaatttcagcacctcgttttctgcatttacaaatcgcggaaaacttgcctgcaaatttagcagcatgggcgcaatcgatcaacgatgttcaagcctggctcgtttcctttttgattcagcacacatctctgacagcttcaaaatcgttttcagaacagctactgaagccccttctttactgacgttccccatacaaaaccttacaaaatcagaaattcagaattttgtatattcaaaaaagtttttttgactgcatacacccactcacacgatcgaataaaccacacaaacagtattatctagatttttagatcgtacatcatttaacaaacagaatattattctgctttttagatgttatctagatcattagatcgctcacgcggcattgacaggttttaaatgtcgcacacacaatactatccagatgattgtaaaaagctcgttcatcgcgttttttgtgctcattgcctggaaaatgagcactctttgacgcccgttagaacgcttgtcatctcatgctctttaacaaccccggacagcggtcattgcctaaagccctggcataaggaggttattattcgtgcatttcaagcaccgctggcatctgtcagcaacgggctacgtaacagagtgacgtgccgcgccatctacacaggtaacgactctttatccgcaaatatcattctgcatacttaaacccccttatttggtgaactcgcgttgagttaatctcactcactctctccctgagcaagtcgtacaggctgcaacgcagaagtacaccagatttgccagtctccactccaggtaagggggtttagctatgcatgatgatgaacaatcagataaagagcctgtagtgagtggctgcaacttttcataattagcttatgacgctgtattccggggatgtttctatttcagacaaacaaccgggagaaaatatggcgcgtaagttaaaaattaatcctgtcattcctgaatgtgtggcagatttgaaaggatatccactctatatcatcgttgcttattggggattaagaaataataaaacgctcacaacaacggatgttagccgtaatttccttattacacagcaacaatcttatgatgtgcttacctacatttaccaggaagcacagaagcagataacagcaactaaacgaacactatttaacgagcacaaaagaagaattagtgcgttcaggattcttgatattgacaaaggcatattgcgcaccccaaaaaaagagattgcatatgccagctacgacaatataccaactgtaacaatgaaaagtacccgttgtgagatccaagatagttttacagaactgcgccgctggatgtgttcaagaaagacaggtgatcgagtggaggtatttttgaatgtctaagtaccaaataaacgcaaccatcaaaaaaccaggtggtggccccgtgaaatggactcattacagcgacttccctatgaccgctgaagaatgcagaaaaaacttctcaaaagaaaaagaagcaggaaagtgtttttctgttgatgttcatatttcagatttcatttgcaaagaaatacatccactgtgatgaatggggagaggattaatcatgattgacgctataattacgccaatagttacatctattccgttactcttattaattttagttgcgctgatattcgttaaatctgccgtcaaaatcgtgccacaaggtaatgcctggacagtggaacgctttggtaaatatacccatacgctttcccccggtcttcacttcctgatcccggttatggaccgcataggtcaacggatcaacatgatggaaaccgtcctggatattcctaaacaggaagttatttcgaaagacaatgcaaacgtaactatcgatgctgtttgttttgtccaggtcattgatgcagcgaaggcagcttatgaagtcgataatcttgcatcagctatttcaaatcttgttatgaccaatatccgaactgtcgttggtggaatgaatctcgacgatatgctttctcaacgtgacagcatcaattctaaactgttaacggttgtcgattatgcgactgacccgtggggaattaaggtcacacgtattgaaattcgggatgttaaaccaccaaaagaactgactgaagcgatgaacgcgcaaatgaaagcggaacgaactaagcgtgcccggattcttgaagcggaaggtatccgccagtcagaaattctgaaggcagaaggggaaaaacagtctcaaatactgaaagcggaaggggaacggcaatcagcatttcttcagtccgaagcacgcgaacgtcaggcagaagcggaagctcgcgcaacaaaactggtgtcggatgcaatcgctgaaggtgatgttcagtctgttaattactttattgcgcagaaatacactgaagcactccaggcaattggcacagcatcaaacagtaaactggtgatgatgccgcttgattcaagtagcctggtgagttcggttgcaggtatcagtgaactgctaaaaaacgtatcacaggatactcccaaagttgatatgaaacaggctcaacaatatttgtcttaaaacagatagcggacggtgacaatattgttttaatcaccgtccttatattcatattcacgaatgagcaaatcattaaaatgaaaacttatgggttcatccttcttattttacatataatccctatgggggcatggttctttcttctttttattacaaacgatgagaacaaagtagaaaaaatacaaaaccacatcgtatcaatatttccattatggctgaactggggaggggtgatgatagcgatggctctactgcccctgttaatatggagttttaatggcatattcttcggcttctttctgctaatttatgcatttggcgtttataactaccttcatcttctttattcaatttctcccttttatcatggagattagccatgttatggtatacactatttcttctgtgtattgcacttgaacttataaccggaacaggatggttactcttaatcagtcttggtgcattatcaagcgccattgtgggcttttttcttccgatatcacaagaagccaatatatgcttctttgcgtcaatcagcatactggcgtcgataattaagttcttctatgacaaaaaacataagaaattagacactctcctggtgaacccagggcattcacgttttaaaggaaaagaatttacgctcagtgacgatattgttaacggcaaggggcaattactcattggtgatacattctggcctgttgagacgttacacaatgaaaactaccttgcgggaacaagagttattgttacagacatgcaaggaataactcttaaagtaatgaccatcgaagacaagagtgaaaacaaggaataaatcatgcatctttcgttgttaattccgcttacaggagcagcgatgaatgcactatgtatttttattatcagacttctggataaggattttattgaagtctacaaaaaaacgctaaaaaaaattactgcattacatattttattgatggtgttaagtgtcacaggaatagtatgaggacaattctatgcgaaacgcaaatgaaggaatttctcttgcagctattgtagctaaagaaacaacaacaggtaaatggaatggtactggtgggggtattggtttaggtactggtggtattggcttattcatcggaggtgtttctggttctaaacaagagcagacacaaagggcaaaaaactttgaatcgcctaaagaggaagaatacagtctattaaatgtatacggttcgataataaaagttctcgttttcggcgtgctatttggtttatctgcccgtttatttacatctttatcaaacactggttctgattttgctgaaccagtaacaaccaccacagccacaggaaagattcaatctattatgggtggcatggcagaaatggtaagcattttaggcaccgttgtcccttttttagtaattatcacagcaatgatctggtttctgtttttcagcagcaaacgagaaaaagaagagttaactcgagttgaacgtgaagctgctaaaacaaaactccgtatagatgtctatcaccgtttacgttacgttgaaagcgatcatgtcgtttttgacccgattacaggccgggaggttccggcagaacggacgtgtattaataaactgattgaggcacttgttgatgaaagcaacgacatctcaaaaagaaattgacgaacttctgaatgcaataaaaacaggacattcaaaattcattctatcaatacccgtacatactacccatccaatggcccataaaataatgaagccttacttcaggagaacaggaccgcttctgtattcagatagtatattcaggatttgaagaaagcatttatttatatagggcatacaaaaatgagtgcttttattaagctggcatctgttctggcgttatttattagcccggttgtggttgcaatagcaggagaacaatctcactgtacaaaaatcaacgaataccctttcatcgtcactcaatgcgacgacggaactgtgacagtggtaaatgtgataaataaccgtgtagctgtgtgccgtaaaggggaatcatgcaaagaaataaa

SEQ ID NO: 171 - DNA, 60 bp, Artificial Sequence
  oligonucleotide opilV-F1
tcaccatcacggcgactacaaagacgatgacgacaagtaaatgggaattagccatggtcc

SEQ ID NO: 172 - DNA, 60 bp, Artificial Sequence
  oligonucleotide opilV-R1
taaaaaatcactctgtagttgttctatcataagtgaatccgtgtaggctggagctgcttc

SEQ ID NO: 173 - DNA, 68 bp, Artificial Sequence
  oligonucleotide opilV-F2
cagtacaggggcgatactttcgtgccaatccggtcggtggcatcaccatcaccatcacggcgactaca

SEQ ID NO: 174 - DNA, 20 bp, Artificial Sequence
  oligonucleotide opilV-F3
ggaggaatatgctgtcctgg

SEQ ID NO: 175 - DNA, 22 bp, Artificial Sequence
  oligonucleotide opilV-R3
tctggtggcaataaagtgaact

SEQ ID NO: 176 - DNA, 60 bp, Artificial Sequence
  orci1-F
caagaatctctaccttccccccttttttgtctggaggggattgggaattagccatggtcc

SEQ ID NO: 177 - DNA, 60 bp, Artificial Sequence
  orci1-R
taaaaaatcactctgtagttgttctatcataagtgaatcctgtgtaggctggagctgctt

SEQ ID NO: 178 - DNA, 23 bp, Artificial Sequence
  orci2-R
gtgatattgcatttcgaagcaag

SEQ ID NO: 179 - DNA, 20 bp, Artificial Sequence
  orci2-R
ccaggacagcatattcctcc

SEQ ID NO: 180 - DNA, 60 bp, Artificial Sequence
  opilV1-F
ctcactcgtaccgggaatattattctgaggattaagagcaatgggaattagccatggtcc

SEQ ID NO: 181 - DNA, 60 bp, Artificial Sequence; identical to SEQ ID NO: 172
  opilV1-R

SEQ ID NO: 182 - DNA, 20 bp, Artificial Sequence
  opilV2-F
ccgttcctttgtggcggaat

SEQ ID NO: 183 - DNA, 20 bp, Artificial Sequence
  opilV2-R
ccaggacagcatattcctcc

SEQ ID NO: 184 - DNA, 60 bp, Artificial Sequence
  opilV3-F
cagtacaggggcgatactttcgtgccaatccggtcggtggtctggtggcaataaagtgaa

SEQ ID NO: 185 - DNA, 40 bp, Artificial Sequence
  opilV3-R
ggaccatggctaattcccatttaaccgaaggggcaacaat

SEQ ID NO: 186 - DNA, 40 bp, Artificial Sequence
  opilV4-F
attgttgccccttcggttaaatgggaattagccatggtcc

SEQ ID NO: 187 - DNA, 60 bp, Artificial Sequence; identical to SEQ ID NO: 172
  opilV1-R

SEQ ID NO: 188 - DNA, 60 bp, Artificial Sequence
  opilV5-F
cagtacaggggcgatactttcgtgccaatccggtatctggacaacggcaaaagtgaactt

SEQ ID NO: 189 - DNA, 40 bp, Artificial Sequence
  opilV5-R
ggaccatggctaattcccatttaaatcccagcaccaggaa

SEQ ID NO: 190 - DNA, 40 bp, Artificial Sequence
  opilV6-F
ttcctggtgctgggatttaaatgggaattagccatggtcc

SEQ ID NO: 191 - DNA, 60 bp, Artificial Sequence; identical to SEQ ID NO: 172
  opilV1-R

SEQ ID NO: 192 - DNA, 60 bp, Artificial Sequence
  opilV7-F
cagtacaggggcgatactttcgtgccaatccggtacgtggaaaaaaattggcgcaggtga

SEQ ID NO: 193 - DNA, 40 bp, Artificial Sequence
  opilV7-R
ggaccatggctaattcccattcactggcaaatggcgtaaa

SEQ ID NO: 194 - DNA, 40 bp, Artificial Sequence
  opilV8-F
tttacgccatttgccagtgaatgggaattagccatggtcc

SEQ ID NO: 195 - DNA, 60 bp, Artificial Sequence; identical to SEQ ID NO: 172
  opilV1-R

SEQ ID NO: 196 - DNA, 60 bp, Artificial Sequence
  opilV9-F
cagtacaggggcgatactttcgtgccaatccggtacgtggagaagggcatcaggtagcac

SEQ ID NO: 197 - DNA, 40 bp, Artificial Sequence
  opilV9-R
ggaccatggctaattcccattcactggcaaaccacgatgt

SEQ ID NO: 198 - DNA, 40 bp, Artificial Sequence
  opilV10-F
acatcgtggtttgccagtgaatgggaattagccatggtcc

SEQ ID NO: 199 - DNA, 60 bp, Artificial Sequence; identical to SEQ ID NO: 172
  opilV1-R

SEQ ID NO: 200 - DNA, 60 bp, Artificial Sequence
  opilV11-F
cagtacaggggcgatactttcgtgccaatccggtgtgtggagggcattaggtggaaagct

SEQ ID NO: 201 - DNA, 40 bp, Artificial Sequence
  opilV11-R
ggaccatggctaattcccatttaattgagagttacacagg

SEQ ID NO: 202 - DNA, 40 bp, Artificial Sequence
  opilV12-F
cctgtgtaactctcaattaaatgggaattagccatggtcc

SEQ ID NO: 203 - DNA, 60 bp, Artificial Sequence; identical to SEQ ID NO: 172
  opilV1-R

SEQ ID NO: 204 - DNA, 60 bp, Artificial Sequence
  opilV13-F
cagtacaggggcgatactttcgtgccaatccggtgtgtggagaacttccggttcctctaa

SEQ ID NO: 205 - DNA, 40 bp, Artificial Sequence
  opilV13-R
ggaccatggctaattcccatttaagtttggtatccaaaaa

SEQ ID NO: 206 - DNA, 40 bp, Artificial Sequence
  opilV14-F
tttttggataccaaacttaaatgggaattagccatggtcc

SEQ ID NO: 207 - DNA, 60 bp, Artificial Sequence; identical to SEQ ID NO: 172
  opilV1-R

SEQ ID NO: 208 - DNA, 60 bp, Artificial Sequence
  opilV15-F
cagtacaggggcgatactttcgtgccaatccggtacgtggcagaaaaatggcggcggtac

SEQ ID NO: 209 - DNA, 40 bp, Artificial Sequence
  opilV15-R
ggaccatggctaattcccattcactgacacaatgcataag

SEQ ID NO: 210 - DNA, 40 bp, Artificial Sequence
  opilV16-F
cttatgcattgtgtcagtgaatgggaattagccatggtcc

SEQ ID NO: 211 - DNA, 60 bp, Artificial Sequence; identical to SEQ ID NO: 172
  opilV1-R

SEQ ID NO: 212 - DNA, 60 bp, Artificial Sequence
  opilV17-F
cagtacaggggcgatactttcgtgccaatccggttcgtggaaatcaataggttcatgtgc

SEQ ID NO: 213 - DNA, 40 bp, Artificial Sequence
  opilV17-R
ggaccatggctaattcccatttagcggaagcagtgaacag

SEQ ID NO: 214 - DNA, 40 bp, Artificial Sequence
  opilV18-F
ctgttcactgcttccgctaaatgggaattagccatggtcc

SEQ ID NO: 215 - DNA, 60 bp, Artificial Sequence; identical to SEQ ID NO: 172
  opilV1-R

SEQ ID NO: 216 - DNA, 20 bp, Artificial Sequence
  opPilS-F1
ctgtcagaccaagtttactc

SEQ ID NO: 217 - DNA, 32 bp, Artificial Sequence
  opPIlS-R1
ttttgcctcctacgctagcccaaaaaaacggg

SEQ ID NO: 218 - DNA, 21 bp, Artificial Sequence
  opPilS-F2
aaccgtattaccgcctttgag

SEQ ID NO: 219 - DNA, 60 bp, Artificial Sequence
  opPilS-R2
tcaatctaaagtatatatgagtaaacttggtctgacaggtaaacttggtctgacagctcg

SEQ ID NO: 220 - DNA, 60 bp, Artificial Sequence
  opPilS-F3
tctccatacccgtttttttgggctagcgtaggaggcaaaaatgtcttctattaatatttt

SEQ ID NO: 221 - DNA, 60 bp, Artificial Sequence
  opPilS-R3
ggcgagcggtatcagctcactcaaaggcggtaatacggtttcaggaatcagtgctgaagg

SEQ ID NO: 222 - DNA, 60 bp, Artificial Sequence
  opPilV4'-F
tctccatacccgtttttttgggctagcgtaggaggcaaaaatgaaaaagacagataaagg

SEQ ID NO: 223 - DNA, 60 bp, Artificial Sequence
  opPilV4'-R
ggcgagcggtatcagctcactcaaaggcggtaatacggttttaagtttggtatccaaaaa

1.-49. (canceled)

50. A method for transferring, in vivo in a subject suspected of having a recipient bacterium, a genetic cargo from a conjugative bacterial host cell to the recipient bacterium, the method comprising administering an effective amount of a conjugative recombinant bacterial host cell to the subject under conditions to allow the transfer of the genetic cargo to the recipient bacterium, wherein the conjugative host cell comprises:
the genetic cargo, wherein the genetic cargo comprises a transport module operatively associated with a payload module;
a type IV secretion system module;
a mating pair stabilization module comprising a type IV adhesion pilus, the type IV adhesion pilus comprising an adhesin; and
a mobilization module encoding a transport machinery,
wherein the transport module is capable of being recognized by transport machinery encoded by the mobilization module.

51. The method of claim 50, wherein the conjugative bacterial host cell is a probiotic bacterial host cell.

52. The method of claim 50, wherein the conjugative bacterial host cell is an enteric bacterium.

53. The method of claim 50, wherein the modification system of the conjugative bacterial host cell is substantially similar to the restriction-modification system of the recipient bacterium.

54. The method of claim 50, wherein the payload module encodes a heterologous protein.

55. The method of claim 54, wherein the heterologous protein is a therapeutic protein, allows for the production or the degradation of a metabolite or is a nuclease.

56.-57. (canceled)

58. The method of claim 55, wherein the nuclease is a clustered regularly interspaced short palindromic repeat (CRISPR) associated DNA-binding (Cas) protein and the payload module further encodes a guide RNA (gRNA) molecule recognizable by the Cas protein.

59. The method of claim 50, wherein the genetic cargo is a guide RNA (gRNA) molecule, wherein the gRNA is substantively complementary to a DNA or a RNA molecule in the recipient bacterium.

60. The method of claim 59, wherein the DNA molecule is a gene in the recipient bacterium.

61. The method of claim 60, wherein the gene encodes a virulence factor in the recipient bacterium.

62. The method of claim 61, wherein the gene encodes, in the recipient bacterium, a protein involved in a resistance to an antibiotic, a toxin or a pilus in the recipient bacterium.

63. The method of claim 50 for the treatment or the alleviation of symptoms of a dysbiosis or an infection caused by the recipient bacterium.

64. The method of claim 50, wherein the conjugative bacterial host cell comprises a transfer machinery located on a second extrachromosomal vector, wherein:
the transfer machinery comprises the type IV secretion system module, the mating pair stabilization module and a second vegetative replication module;
the conjugative bacterial host cell comprises a second maintenance module encoding a second replication machinery; and
the second vegetative replication module is capable of being recognized by the second replication machinery encoded by the second maintenance module.

65. The method of claim 50, wherein the mating pair stabilization module further comprises a shufflase for modifying a shufflon associated with the gene encoding the adhesin.

66. The method of claim 50, wherein the subject is a human subject or an animal subject.

67. The method of claim 50, comprising a transfer machinery located in the bacterial chromosome, wherein the transfer machinery comprises the type IV secretion system module, the mating pair stabilization module and the mobilization module.
